(19) United States
(12) Patent Application Publication
(10) Pub. No.: US 2005/0287551 A1
(43) Pub. Date: Dec. 29, 2005

(54) Susceptibility gene for human stroke; methods of treatment

(75) Inventors: Solveig Gretarsdottir, Reykjavik (IS); Gudmar Thorleifsson, Reykjavik (IS); Jeffrey R. Gulcher, Lake Barrington, IL (US)

Correspondence Address: HAMILTON, BROOK, SMITH & REYNOLDS, P.C., 530 VIRGINIA ROAD, P.O. BOX 9133, CONCORD, MA, 01742-9133, US

(73) Assignee: deCODE genetics ehf., Reykjavik (IS)

(21) Appl. No.: 11/091,018

(22) Filed: Mar. 25, 2005

Related U.S. Application Data
(63) Continuation of application No. PCT/US03/29906, filed on Sep. 25, 2003.
Application No. PCT/US03/29906 is a continuation of application No. 10/650,120, filed on Aug. 27, 2003, now abandoned.
Application No. PCT/US03/29906 is a continuation-in-part of application No. 10/419,723, filed on Apr. 18, 2003.
Application No. 10/419,723 is a continuation-in-part of application No. 10/255,120, filed on Sep. 25, 2002.
Application No. 10/255,120 is a continuation-in-part of application No. 10/067,514, filed on Feb. 4, 2002, now abandoned.
Application No. 10/067,514 is a continuation-in-part of application No. 09/811,352, filed on Mar. 19, 2001, now abandoned.

(51) Int. Cl. C12Q 1/68

(52) U.S. Cl. 435/6

(57) ABSTRACT

A role of the human PDE4D gene in stroke is disclosed. Methods for diagnosis, prediction of clinical course and treatment for stroke using polymorphisms in the PDE4D gene are also disclosed.

### RELATED APPLICATIONS

[0001] This application is a continuation of International Application No. PCT/US03/29906, which designated the United States and was filed on Sep. 25, 2003, published in English, which is a continuation of and claims priority to U.S. application Ser. No. 10/650,120, filed Aug. 27, 2003, which is a continuation-in-part of U.S. application Ser. No. 10/419,723 filed Apr. 18, 2003, which is a continuation-in-part of U.S. application Ser. No. 10/255,120, filed Sep. 25, 2002, which is a continuation-in-part of U.S. application Ser. No. 10/067,514, filed Feb. 4, 2002, which is a continuation-in-part of U.S. application Ser. No. 09/811,352, filed Mar. 19, 2001. The entire teachings of the above applications are incorporated herein by reference.

### BACKGROUND OF THE INVENTION

[0002] Stroke is a common and serious disease. Each year in the United States more than 600,000 individuals suffer a stroke and more than 160,000 die from stroke-related causes (Sacco, R. L. et al., Stroke 28, 1507-17 (1997)). In western countries stroke is the leading cause of severe disability and the third leading cause of death (Bonita, R., Lancet 339, 342-4 (1992)). The lifetime risk of those who reach the age of 40 exceeds 10%.

[0003] The clinical phenotype of stroke is complex but is broadly divided into ischemic (accounting for 80-90%) and hemorrhagic stroke (10-20%) (Caplan, L. R. Caplan's Stroke: A Clinical Approach, 1-556 (Butterworth-Heinemann, 2000)). Ischemic stroke is further subdivided into large vessel occlusive disease (referred to here as carotid stroke), usually due to atherosclerotic involvement of the common and internal carotid arteries, small vessel occlusive disease, thought to be a non-atherosclerotic narrowing of small end-arteries within the brain, and cardiogenic stroke due to blood clots arising from the heart usually on the background of atrial fibrillation or ischemic (atherosclerotic) heart disease (Adams, H. P., Jr. et al., Stroke 24, 35-41 (1993)). Therefore, it appears that stroke is not one disease but a heterogeneous group of disorders reflecting differences in the pathogenic mechanisms (Alberts, M. J. Genetics of Cerebrovascular Disease, 386 (Futura Publishing Company, Inc., New York, 1999); Hassan, A. & Markus, H. S. Brain 123, 1784-812 (2000)). However, all forms of stroke share risk factors such as hypertension, diabetes, hyperlipidemia, and smoking (Sacco, R. L. et al., Stroke 28, 1507-17 (1997); Leys, D. et al., J. Neurol. 249, 507-17 (2002)). Family history of stroke is also an independent risk factor suggesting the existence of genetic factors that may interact with environmental factors (Hassan, A. & Markus, H. S. Brain 123, 1784-812 (2000); Brass, L. M. & Alberts, M. J. Baillieres Clin. Neurol. 4, 221-45 (1995)).

[0004] The genetic determinants of the common forms of stroke are still largely unknown. There are examples of mutations in specific genes that cause rare Mendelian forms of stroke such as the Notch3 gene in CADASIL (cerebral autosomal dominant arteriopathy with subcortical infarctions and leukoencephalopathy) (Tournier-Lasserve, E. et al., Nat. Genet. 3, 256-9 (1993); Joutel, A. et al., Nature 383, 707-10 (1996)), Cystatin C in the Icelandic type of hereditary cerebral hemorrhage with amyloidosis (Palsdottir, A. et al., Lancet 2, 603-4 (1988)), APP in the Dutch type of hereditary cerebral hemorrhage (Levy, E. et al., Science 248, 1124-6 (1990)) and the KRIT1 gene in patients with hereditary cavernous angioma (Gunel, M. et al., Proc. Natl. Acad. Sci. USA 92, 6620-4 (1995); Sahoo, T. et al., Hum. Mol. Genet. 8, 2325-33 (1999)). None of these rare forms of stroke occur on the background of atherosclerosis, and therefore, the corresponding genes are not likely to play roles in the common forms of stroke which most often occur with atherosclerosis.

[0005] It is very important for the health care system to develop strategies to prevent stroke. Once a stroke happens, irreversible cell death occurs in a significant portion of the brain supplied by the blood vessel affected by the stroke. Unfortunately, the neurons that die cannot be revived or replaced from a stem cell population. Therefore, there is a need to prevent strokes from happening in the first place. Although we already know of certain clinical risk factors that increase stroke risk (listed above), there is an unmet medical need to define the genetic factors involved in stroke to more precisely define stroke risk. Further, if predisposing alleles are common in the general population and the specificity of predicting a disease based on their presence is low, additional loci such as protective loci are needed for meaningful prediction of disposition of the disease state. There is also a great need for therapeutic agents for preventing the first stroke or further strokes in individuals who have suffered a previous stroke or transient ischemic attack.

### SUMMARY OF THE INVENTION

[0006] A locus conferring susceptibility to ischemic stroke to chromosome 5q12 in the Icelandic population has been mapped and the identification of phosphodiesterase 4D (PDE4D) as the gene at 5q12 contributing to the risk of ischemic stroke has been reported. This locus was extensively fine mapped and tested for association to stroke. Most striking is that haplotypes can be classified into three distinct groups: wild type, at-risk and protective. Additionally, a significant disregulation of multiple PDE4D isoforms in stroke patients was observed. The strongest association was within the PDE4D, especially to the two major subtypes of ischemic stroke, carotid and cardiogenic stroke. We have found variation in PDE4D that more than doubles the risk for cardiogenic and carotid stroke, two of the most common forms of ischemic stroke. We have shown that there are at least 9 isoforms of PDE4D at the mRNA level and the protein level. The basis for these isoforms is the use of alternative 5 prime exons that are alternatively spliced into a common set of exons defining the catalytic domain as well as, in the case of the long forms, a set of exons defining a common core in the regulatory domain. The PDE4D gene is involved in the pathogenesis of stroke. The PDE4D gene may be involved through artherosclerosis, the major pathological process underlying ischemic stroke. Our results indicate that atherosclerosis is a cAMP disease resulting from disregulation of its levels within the vasculature.

[0007] In one aspect, the invention relates to methods of diagnosing a predisposition to stroke. The methods of diagnosing a predisposition to stroke in an individual include detecting the presence of a polymorphism in PDE4D, as well as detecting alterations in expression of a PDE4D polypeptide or isoform, such as the presence of, or relative expression of different splicing variants of PDE4D polypeptides. For example, it may be that the ratio of certain splice variants could be used as a diagnostic marker for stroke predisposition. Also an abnormal splice form can be detected (that is one that is not normally expressed but is created from a DNA sequence mutation that leads to an abnormal splice form to be created from the primary transcript) may be created from mutations in the PDE4D gene. For example, new splice sites might be created from a single base substitution within an intron that is inappropriately used as a splice acceptor or donor site, resulting in an abnormal message which is likely to have a premature stop codon leading to a truncated form of PDE4D protein. The alterations in expression can be quantitative, qualitative, or both quantitative and qualitative. The methods of the invention allow the accurate diagnosis of stroke at or before disease onset, thus reducing or minimizing the debilitating effects of stroke. The methods of the invention also diagnose those individuals who are protected against developing stroke even in the face of other risk factors including but not restricted to hypertension, diabetes, hyperlipidemia, smoking history, previous stroke, TIA, MI or PAOD, or carriers of stroke associated gene variants. In one embodiment, predisposition to stroke or susceptibility to stroke can be assessed by determining PDE4D isoform levels in the individual compared to control levels, wherein a difference in isoform expression is indicative of predisposition or susceptibility to stroke. Preferably, the level of expression of PDE4D7 and/or PDE4D9 is assessed.

[0008] The invention additionally relates to an assay for identifying agents that alter (e.g., enhance or inhibit) the activity or expression or transcription of one or more PDE4D polypeptides or isoforms. Such an assay may also identify agents that alter the relative expression of one or more PDE4D isoforms with respect to other isoforms at either the mRNA level or polypeptide level. For example, a cell, cellular fraction, or solution containing a PDE4D polypeptide or a fragment or derivative thereof, can be contacted with an agent to be tested, and the level of PDE4D polypeptide expression or activity can be assessed. Alternatively, a cell, or cell with artificial DNA construct with part or all of the PDE4D gene with or without a reporter gene can be used to identify agents that may directly affect transcription at one or more of the many alternative PDE4D promoters upstream of the alternative 5 prime exons or splicing efficiency of the primary transcript to one or more mRNA isoforms. The activity or expression of more than one PDE4D polypeptides can be assessed concurrently (or the corresponding reporter gene activity) (e.g., the cell, cellular fraction, or solution can contain more than one type of PDE4D polypeptide, such as different splicing variants, and the levels of the different polypeptides or splicing mRNA variants can be assessed).

[0009] Agents that enhance or inhibit PDE4D mRNA or polypeptide expression or activity are also included in the current invention, as are methods of altering (enhancing or inhibiting) PDE4D mRNA or polypeptide expression or activity by contacting a cell containing PDE4D gene, mRNA, and/or polypeptide, or by contacting the PDE4D gene, mRNA, and/or polypeptide, with an agent that enhances or inhibits expression or activity of PDE4D mRNA or polypeptide. In another embodiment, isoform mRNA and/or protein levels can be altered, compared to control levels, using the agents of the invention.

[0010] Additionally, the invention pertains to pharmaceutical compositions comprising the nucleic acids of the invention, the polypeptides of the invention, and/or the agents that alter activity of PDE4D polypeptide. The invention further pertains to methods of treating stroke, by administering PDE4D therapeutic agents, such as nucleic acids of the invention, polypeptides of the invention, the agents that alter activity of PDE4D polypeptide, or compositions comprising the nucleic acids, polypeptides, and/or the agents that alter activity of PDE4D polypeptide.

[0011] The invention further relates to methods for preventing the occurrence of stroke in an individual in need thereof by regulating a PDE4D mRNA and/or polypeptide isoform level compared to control levels, whereby the regulated isoform level mimics the level of a healthy individual. Isoform expression at the mRNA and/or polypeptide level can be regulated using the agents and pharmaceutical compositions of the invention, by genetic alteration, by altering the ratio of isoforms and/or their absolute expression. In one embodiment, isoforms PDE4D7 and/or PDE4D9 can be regulated.

[0012] The invention further provides a method of diagnosing susceptibility to stroke in an individual. This method comprises screening for one of the at-risk haplotypes in the phosphodiesterase 4D gene that is more frequently present in an individual susceptible to stroke, compared to the frequency of its presence in the general population, wherein the presence of an at-risk haplotype is indicative of a susceptibility to stroke. An “at-risk haplotype” is intended to embrace one or a combination of haplotypes described herein over the PDE4D gene that show high correlation to stroke. In one embodiment, the at-risk haplotype is characterized by the presence of at least one single nucleotide polymorphism at nucleic acid positions at risk haplotype 1 is G at nucleic acid position 142780 respectively, relative to SEQ ID NO: 1 and allele 0 of microsatellite marker AC0088181-1. In another embodiment, the at-risk haplotype 2 is characterized by the presence of at least one single nucleotide polymorphism and microsatellite marker at nucleic acid positions 142780, 135112, 132562, 131865, 129361, 129360, 125304, 123426, 123312, 120628, 118914, 111781, 111252, 109301, 107849, 105225, 104552, 102977, 100795, 99035, 88614, 88456, 83119, 82244, 80127, 78552, relative to SEQ ID NO: 1 and allele 0 microsatellite marker AC0088181-1.

[0013] In yet another embodiment, the at-risk haplotype 3 is characterized by the presence of at least one polymorphism at nucleic acid positions 138806, 131865, 129361, 120628, 91470 relative to SEQ ID NO: 1.

[0014] Also described are methods for diagnosing susceptibility to stroke in an individual comprising screening for an at-risk haplotype in the phosphodiesterase 4D gene that is more frequently present in an individual susceptible to stroke (affected), compared to the frequency of its presence in a healthy individual (control) wherein the screening for the presence of an at-risk haplotype within or near PDE4D that significantly correlates with at least one of the haplotypes described herein or stroke susceptibility. As an example of a simple test for correlation would be a Fisher-exact test on a two by two table. Given a cohort of chromosomes the two by two table is constructed out of the number of chromosomes that include both of the haplotypes, one of the haplotype but not the other and neither of the haplotypes.

[0015] A protective haplotype is intended to embrace one or a combination of haplotypes described herein over the PDE4D gene that show a protective characteristic or property of a reduced risk of stroke. The particular combination of genetic markers (haplotypes) are present at a higher than expected frequency in controls than patients. Individuals with a protective allele or haplotype are about 30% less likely to have a stroke compared to the general population. In one embodiment, a protective haplotype is characterized by the presence of at least one single nucleotide polymorphism, such as the allele A at nucleotide position 142780 relative to SEQ ID NO: 1. The presence of the polymorphisms that comprise the at-risk haplotype or protective haplotype can be determined by electrophoretic analysis, restriction length polymorphism analysis, fluorescence energy transfer detection, kinetic PCR, allele specific PCR, sequence analysis, hybridization analysis or other known techniques.

[0016] Kits for diagnosing susceptibility to stroke in an individual are also disclosed and comprise primers for nucleic acid amplification of a region of PDE4D comprising the at-risk haplotype and/or protective haplotype.

[0017] The first major application of the current invention involves prediction of those at higher risk of developing a stroke. Diagnostic tests that define genetic factors contributing to stroke might be used together with or independent of the known clinical risk factors to define an individual's risk relative to the general population. Better means for identifying those individuals at risk for stroke should lead to better prophylactic and treatment regimens, including more aggressive management of the current clinical risk factors such as hypertension, diabetes, hypercholesterolemia, hypertriglyceridemia, obesity, and inflammatory components as reflected by increased C-reactive protein levels or other inflammatory markers. Information on genetic risk may be used by physicians to help convince particular patients to adjust life style and quit smoking. This invention provides the means to define a genetic component that doubles an individual's risk for stroke. Also described are means to define the genetic components that protect an individual from stroke.

[0018] The second major application of the current invention is the specific identification of a rate-limiting pathway involved in stroke. While many have attempted to find genes that are over-expressed or under-expressed in atherosclerosis plaques in the carotid arteries, the vast majority of the changes seen in diseased blood vessels compared to normal blood vessels are simply a reaction to the underlying process of atherosclerosis and stroke predisposition and are not the underlying cause. A disease gene with genetic variation that is significantly more common in stroke patients as compared to controls represents a specifically validated causative step in the pathogenesis of stroke. That is, the uncertainty about whether a gene is causative or simply reactive to the disease process is eliminated. The protein encoded by the disease gene defines a rate-limiting molecular pathway involved in the biological process of stroke predisposition. The proteins encoded by such stroke genes or its interacting proteins in its molecular pathway may represent drug targets that may be selectively modulated by small molecule, protein, antibody, or nucleic acid therapies. Such specific information is greatly needed since stroke prevention and treatment is a major unmet medical need that affects over a half-million Americans each year. Also useful is determining the gene that is protective against stroke. The proteins encoded by the protective gene and the biological pathway that it is a member may represent another target selectively modulated by small molecule, protein antibody or nucleic acid therapies.

[0019] A third application of the current invention is its use to predict an individual's response to a particular drug, even drugs that do not act on PDE4D or its pathway. It is a well-known phenomenon that in general, patients do not respond equally to the same drug. Much of the differences in drug response to a given drug is thought to be based on genetic and protein differences among individuals in certain genes and their corresponding pathways. Our invention defines the PDE4D pathway and its effect on cAMP levels in cells where it is expressed as one key molecular pathway involved in stroke risk. Some current or future therapeutic agents may be able to affect this pathway directly or indirectly and therefore, be effective in those patients whose stroke risk is in part determined by PDE4D pathway genetic variation. On the other hand, those same drugs may be less effective or ineffective in those patients who do not have at risk variation in the PDE4D gene or pathway. Therefore, PDE4D variation or haplotypes may be used as a pharmacogenomic diagnostic to predict drug response and guide choice of therapeutic agent in a given individual.

[0020] The invention helps meet the unmet medical needs in at least two major ways: 1) it provides a means to define patients at higher risk for stroke than the general population who can be more aggressively managed by their physicians in an effort to prevent stroke; and 2) it defines a drug target that can be used to screen and develop therapeutic agents that can be used to prevent stroke before it happens or prevent a second stroke in those who have already suffered a stroke or transient ischemic attack.

### BRIEF DESCRIPTION OF THE DRAWINGS

[0021] The foregoing and other objects, features and advantages of the invention will be apparent from the following more particular description of certain embodiments of the invention, as illustrated in the accompanying drawings.

[0022] FIGS. 1.1 and 1.2 show two family pedigrees each affected by several of the stroke subtypes, including hemorrhagic stroke.

[0023] FIGS. 2.1, 2.2 and 2.3 show the genetic, combined and physical maps for locating the PDE4D gene using 30 polymorphic markers. For the combined map, all markers have been assigned in the genetic and physical map unless otherwise indicated (* indicates marker only assigned in the physical map; ** indicates markers only assigned in genetic map).

[0024] FIG. 3 shows the schematic representations of PDE4D splice variants. Splice variants PDE4D9 are novel, as well as exons D7A-1, D7A-2, D7A-3, D8 and D9. Splice variants 4DN1, 4DN2 and 4DN3 (Miro, et al., Biochem. Biophys. Res. Comm., 274: 415-421 (2002), and 4D1, 4D2, 4D3, 4D4 and 4D5 are known (Bolger et al., Biochem. J. pt. 2: 539-548 (1997).

[0025] FIG. 4 is a graphic representation showing PDE4D isoform expression in EBV transformed cells (expression of PDE4D3 and PDE4D9 below detection limits).

[0026] FIG. 5 is a graphic representation showing expression of PDE4D isoforms in EBV transformed cells from patients with or without the stroke-associated haplotype.

[0027] FIG. 6 is a graphic representation showing expression of PDE4D isoforms in EBV cells from controls with or without the stroke-associated haplotype.

[0028] FIGS. 7.1 to 7.10 show the amino acid sequences for the isoforms of the PDE4D gene. SEQ ID NO: 2 is D4; SEQ ID NO: 3 is N2; SEQ ID NO: 4 is D5; SEQ ID NO: 5 is N3; SEQ ID NO: 6 is D3; SEQ ID NO: 7 is N1; SEQ ID NO: 8 is D8; SEQ ID NO: 9 is D1; and SEQ ID NO: 10 is D2.

[0029] FIGS. 8.1 and 8.2 list all publicly available PDE4D mRNAs and novel cDNA segments identified by deCODE genetics.

[0030] FIGS. 9.1 to 9.351 show the genomic sequence of the human PDE4D gene.

[0031] FIGS. 10.1 to 10.3 show a graphic representation showing the single marker allelic association within the PDE4D gene. FIG. 10.1 is a schematic showing the gene structures. FIG. 10.2 shows graphic representation of the microsatellite and SNP distribution within the PDE4D gene. FIG. 10.3 shows graphic representation of the single marker allelic association across the PDE4D gene for both microsatellites (filled circles) and SNPs (open circles); negative log p-valve versus the physical location in kilobases.

[0032] FIGS. 11.1 to 11.3 graphically depict the haplotype association for carotid and cardiogenic stroke combined. Estimated haplotype frequencies for patients and controls respectively, are indicated within parentheses. FIG. 11.1 is a comparison of groups of haplotypes constructed from SNP45 and AC008818-1, two markers separated by 6 kb. Note that X is a composite allele that denotes jointly all alleles of AC008818-1 except allele 0. Apart from haplotype A0 that is not found in our samples, other haplotypes can be grouped into three groups with distinct risks. Each arrow corresponds to a comparison between two groups and RR is the estimated risk of the group the arrow is pointing at relative to the other group. The difference between 1 and the information (Info) is a measure of the fraction of information that is lost due to uncertainty in phase and missing genotypes. FIG. 11.2 shows intermediate results when the investigation is extended from SNP45 and AC008818-1, which are both in LD block B, to include 25 SNPs in LD block C. H_{C} is the at-risk haplotype, identified in FIG. 13 and L_{C} is a composite haplotype that denotes jointly all haplotypes of the 25 SNPs except H_{C}. Together with AC008818-1 and SNP45, the haplotypes here span 64 kb. Haplotype G0 in A is split into extended haplotypes G0H_{C} and G0L_{C}. G0H_{C} has significantly higher risk than G0L_{C}, and the risk of G0L_{C} is not distinguishable from the wild type GX. FIG. 11.3 shows a refinement of the groupings in A—G0L_{C} is moved from the at-risk group to the wild type group. Also noted is that the extended haplotype AXH_{C} does not exist indicating that blocks B and C are in LD.

[0033] FIG. 12 is a schematic representation of the physical map of STRK1 interval showing all genes and mRNAs in region. Markers identified with an asterisk (*) indicate those with significant single marker association.

[0034] FIGS. 13.1 to 13.3 show a graphical depiction of the linkage disequilibrium (LD) and haplotypes in the 5′end of PDE4D gene. FIG. 13.1 shows pairwise linkage disequilibrium between SNPs in a 600 kb region in the 5′ end of PDE4D. The markers are plotted equidistant. Two measures of LD are shown: D′ in the upper left triangle and p-values in the lower right triangle. This region can be divided into three blocks of strong LD, each with limited haplotype diversity, block A, block B and block C. The lines indicate the position of the three exons D7-1, D7-2 and D7-3 and the microsatellite marker AC008818-1. FIG. 13.2 show all common haplotypes identified within each of the three blocks. Association results for all the haplotypes are presented in Table 2C. FIG. 13.3 depicts the percentage of chromosomes within each block that match one of the common haplotypes.

### DETAILED DESCRIPTION OF THE INVENTION

[0035] The first major stroke locus, STRK1, was mapped to 5q12 using a genome-wide search for susceptibility genes in the common forms of stroke. A broad but rigorous definition of the phenotype was used including patients with ischemic stroke, transient ischemic attack (TIA), and hemorrhagic stroke. The lod score after adding a higher density of markers (one marker every 1 cM) was 4.40 (P=3.9×10⁻⁶) at marker D5S2080. The lod score increased to 4.9 after the hemorrhagic stroke patients were removed, suggesting that the gene at the locus is primarily important for ischemic stroke. The most promising region harboring a stroke susceptibility gene was narrowed down to a segment less than 6 cM (approximately 3.8 Mb), from D5S1474 to D5S398, as defined by a decrease of one in LOD score (will be referred to as the “one-LOD interval” hereafter).

[0036] We describe here the positional cloning of a stroke susceptibility gene located in the STRK1 locus. This region was extensively fine-mapped and tested for association to stroke. The strongest association found in the one-LOD interval was within the phosphodiesterase 4D gene (PDE4D), a member of the large superfamily of cyclic nucleotide phosphodiesterases. The strongest signal observed at PDE4D was to the two major subtypes of ischemic stroke, carotid and cardiogenic stroke. Relative expression of PDE4D isoforms correlated with stroke and with the genetic variation within PDE4D which is associated to stroke. Our results suggest that this gene is involved in pathogenesis of stroke through atherosclerosis, the major pathological process underlying stroke.

[0037] Our results also indicate that genetic variation in the PDE4D gene is associated with ischemic stroke. The direct involvement of PDE4D is strongly supported by both linkage and haplotype association. Multiple markers and haplotypes within the PDE4D gene show strong association to stroke. The haplotypes can be classified into three distinct groups, wild type, at-risk and protective. We first identified the association using microsatellite markers, and supplementing the microsatellite data with a denser set of SNPs further supported this. The strongest association was to the two ischemic subtypes, carotid and cardiogenic stroke. This gene shows no association to small vessel occlusive disease, the form of stroke thought to be independent of atherosclerosis. Haplotype analyses show that the most significant haplotype extends over an area of 260 kb covering the first exon of the PDE4D gene. The haplotype is significantly associated to carotid and cardiogenic stroke with a relative risk of 2.3 and approximately 47% of carotid/cardiogenic stroke patients carry at least one copy of this haplotype. This same haplotype has a relative risk of 1.8 for stroke in general. This haplotype extends over the 5′exon unique to the PDE4D7 isoform and the presumed promoter region of this isoform suggesting that the functional variation may be involved in transcriptional regulation. This hypothesis is also supported by our PDE4D expression analysis that shows that there is significant correlation between the disease associated haplotype and the level of PDE4D7 message.

[0038] The strongest association found for this PDE4D haplotype was to the two major subtypes of ischemic stroke, carotid and cardiogenic stroke suggesting a role for this gene in the vascular biology of atherosclerosis. While there are multiple etiologies for ischemic stroke, atherosclerosis remains the most important one. Atherosclerosis is a chronic progressive disease characterized by accumulation of lipids, fibrous, and cellular elements within the large arteries. These lesions can grow sufficiently large to impede blood flow and, more importantly, their surfaces can rupture leading to local thrombus formation occluding the blood vessel and causing a stroke or myocardial infarction. The major pathological process for the two ischemic subtypes, carotid and cardiogenic stroke is atherosclerosis. First, it is the major cause of stenotic and occlusive lesions of the internal and common carotids that lead to carotid strokes. Second, cardiac thrombi which shed emboli to the brain most commonly occur on the background of coronary artery disease, such as following acute myocardial infarction or ischemic cardiomyopathy, and/or due to atrial fibrillation on the basis of poor compliance of ischemic ventricles (diastolic dysfunction/stiffening). Although atrial fibrillation may occur on the background of other diseases such as valvular disease, hyperthyroidism, and hypertension, in the age group that tends to suffer from stroke, ischemic heart disease remains one of the most important causes. Ischemic stroke resulting from occlusion of small penetrating arteries within the brain (small vessel occlusive disease or lacunar stroke) is generally thought to result from local endothelial proliferation since atherosclerosis only occurs in larger arteries. PDE4D does not show association to small vessel stroke, consistent with it role in atherosclerosis. In summary, atherosclerosis accounts for the majority of all strokes, particularly carotid and cardiogenic stroke, two subphenotypes that show the strongest association to the PDE4D gene.

Representative Target Population

[0039] An individual at risk for stroke is an individual who has at least one risk factor, such as previous stroke or TIA, an at-risk haplotype in one or more stroke risk genes, an at-risk haplotype for the PDE4D gene; a polymorphism in a PDE4D gene; disregulation of PDE4D isoform expression; diabetes; hypertension; hypercholesterolemia; elevated lp(a); obesity; a past or current smoker; an elevated inflammatory marker (e.g., a marker such as C-reactive protein (CRP), serum amyloid A, fibrinogen, tissue necrosis factor-alpha, a soluble vascular cell adhesion molecule (sVCAM), a soluble intervascular adhesion molecule (sICAM), E-selectin, matrix metalloprotease type-1, matrix metalloprotease type-2, matrix metalloprotease type-3, and matrix metalloprotease type-9); increased LDL cholesterol and/or decreased HDL cholesterol; and/or at least one previous myocardial infarction, concurrent MI, acute coronary syndrome, stable angina, atherosclerosis, carotid stenosis, peripheral vascular occlusive disease, or requires treatment for restoration of coronary artery blood flow (e.g., angioplasty, stent, coronary artery bypass graft).

[0040] An individual who has a protective haplotype is one who is less likely to have a stroke. In another embodiment of the invention, an individual who is at risk for stroke is an individual who has a polymorphism in a PDE4D gene, in which the presence of the polymorphism is indicative of a susceptibility to stroke. An individual who has a protective haplotype and less likely to have a stroke is an individual who has a polymorphism in a PDE4D gene such as the A allele at nucleotide position 142780 relative to SEQ ID NO: 1, in which the presence of the polymorphism is indicative of a protection from stroke. The term “gene,” as used herein, refers to not only the sequence of nucleic acids encoding a polypeptide, but also the promoter regions, transcription enhancement elements, splice donor/acceptor sites, splice enhancer and silencer sequences and other regulators of splicing, and other non-transcribed nucleic acid elements. Representative polymorphisms include those presented in Table 11, below.

[0041] In one embodiment of the invention, an individual who is at risk for stroke is an individual who has an at-risk haplotype in PDE4D, as described herein, particularly but not limited to ischemic stroke. Increased risk for the two major subtypes of ischemic stroke, carotid and cardiogenic stroke, can be assessed by screening for at-risk haplotype that comprises SNP5PDM361194, SNP5PDM368135, SNP5PDM370640, SNP5PDM379372 and SNP5PDM408531 at the 5′ UTR of PDE4D7. Results reported herein indicate that PDE4D is involved in pathogenesis of stroke through atherosclerosis. The major pathological process for carotid stroke and cardiogenic stroke is atherosclerosis. Thus, an individual who is at-risk for atherosclerosis, peripheral arterial occlusive disease, or myocardial infarction can also benefit from the teachings of the invention.

Assessment for At-Risk and Protective Haplotypes

[0042] A “haplotype,” as described herein, refers to a combination of genetic markers (“alleles”), such as those set forth in Tables 1, 2C, 4A and 4B. In a certain embodiment, the haplotype can comprise one or more alleles, two or more alleles, three or more alleles, four or more alleles, or five or more alleles. The genetic markers are particular “alleles” at “polymorphic sites” associated with PDE4D. A nucleotide position at which more than one sequence is possible in a population (either a natural population or a synthetic population, e.g., a library of synthetic molecules), is referred to herein as a “polymorphic site”. Where a polymorphic site is a single nucleotide in length, the site is referred to as a single nucleotide polymorphism (“SNP”). For example, if at a particular chromosomal location, one member of a population has an adenine and another member of the population has a thymine at the same position, then this position is a polymorphic site, and, more specifically, the polymorphic site is a SNP. Polymorphic sites can allow for differences in sequences based on substitutions, insertions or deletions. Each version of the sequence with respect to the polymorphic site is referred to herein as an “allele” of the polymorphic site. Thus, in the previous example, the SNP allows for both an adenine allele and a thymine allele.

[0043] Typically, a reference sequence is referred to for a particular sequence. Alleles that differ from the reference are referred to as “variant” alleles. For example, the reference PDE4D sequence is described herein by SEQ ID NO: 1. The term, “variant PDE4D”, as used herein, refers to a sequence that differs from SEQ ID NO: 1, but is otherwise substantially similar. The genetic markers that make up the haplotypes described herein are PDE4D variants.

[0044] Additional variants can include changes that affect a polypeptide, e.g., the PDE4D polypeptide. These sequence differences, when compared to a reference nucleotide sequence, can include the insertion or deletion of a single nucleotide, or of more than one nucleotide, resulting in a frame shift; the change of at least one nucleotide, resulting in a change in the encoded amino acid; the change of at least one nucleotide, resulting in the generation of a premature stop codon; the deletion of several nucleotides, resulting in a deletion of one or more amino acids encoded by the nucleotides; the insertion of one or several nucleotides, such as by unequal recombination or gene conversion, resulting in an interruption of the coding sequence of a reading frame; duplication of all or a part of a sequence; transposition; or a rearrangement of a nucleotide sequence, as described in detail above. Such sequence changes alter the polypeptide encoded by a PDE4D nucleic acid. For example, if the change in the nucleic acid sequence causes a frame shift, the frame shift can result in a change in the encoded amino acids, and/or can result in the generation of a premature stop codon, causing generation of a truncated polypeptide. Alternatively, a polymorphism associated with stroke or a susceptibility to stroke can be a synonymous change in one or more nucleotides (i.e., a change that does not result in a change in the amino acid sequence). Such a polymorphism can, for example, alter splice sites, affect, the stability or transport of mRNA, or otherwise affect the transcription or translation of the polypeptide. The polypeptide encoded by the reference nucleotide sequence is the “reference” polypeptide with a particular reference amino acid sequence, and polypeptides encoded by variant alleles are referred to as “variant” polypeptides with variant amino acid sequences.

[0045] Haplotypes are a combination of genetic markers, e.g., particular alleles at polymorphic sites. The haplotypes described herein, e.g., having markers such as those shown in Table 3, Table 4A and 4B, are found more frequently in individuals with stroke than in individuals without stroke. Therefore, these haplotypes have predictive value for detecting stroke or a susceptibility to stroke in an individual. The haplotypes described herein are a combination of various genetic markers, e.g., SNPs and microsatellites. Therefore, detecting haplotypes can be accomplished by methods known in the art for detecting sequences at polymorphic sites, such as the methods described above.

[0046] In certain methods described herein, an individual who is at risk for stroke is an individual in whom an at-risk haplotype is identified. In one embodiment, the at-risk haplotype is one that confers a significant risk of stroke. In one embodiment, significance associated with a haplotype is measured by an odds ratio. In a further embodiment, the significance is measured by a percentage. In one embodiment, a significant risk is measured as an odds ratio of at least about 1.2, including but not limited to: 1.2, 1.3, 1.4, 1.5, 1.6, 1.7, 1.8 and 1.9. In a further embodiment, an odds ratio of at least 1.2 is significant. In a further embodiment, an odds ratio of at least about 1.5 is significant. In a further embodiment, a significant increase in risk is at least about 1.7 is significant. In a further embodiment, a significant increase in risk is at least about 20%, including but not limited to about 25%, 30%, 35%, 40%, 45%, 50%, 55%, 60%, 65%, 70%, 75%, 80%, 85%, 90%, 95% and 98%. In a further embodiment, a significant increase in risk is at least about 50%. It is understood however, that identifying whether a risk is medically significant may also depend on a variety of factors, including the specific disease, the haplotype, and often, environmental factors.

[0047] An at-risk haplotype in, or comprising portions of, the PDE4D gene, is one where the haplotype is more frequently present in an individual at risk for stroke (affected), compared to the frequency of its presence in a healthy individual (control), and wherein the presence of the haplotype is indicative of stroke or susceptibility to stroke. A protective haplotype in or comprising portions of the PDE4D gene is one where the haplotype is more frequently present in an individual where the haplotype is protective against being affected by stroke compared to the frequency of its presence in an individual with stroke. The presence of the haplotype is indicative of a protection from stroke or protection from susceptibility to stroke as described above.

[0048] Standard techniques for genotyping for the presence of SNPs and/or microsatellite markers can be used, such as fluorescent-based techniques (Chen, et al., Genome Res. 9, 492 (1999)), PCR, LCR, Nested PCR and other techniques for nucleic acid amplification. In one embodiment, the method comprises assessing in an individual the presence or frequency of SNPs and/or microsatellites in, comprising portions of, the PDE4Dgene, wherein an excess or higher frequency of the SNPs and/or microsatellites compared to a healthy control individual is indicative that the individual has stroke, or is susceptible to stroke. See, for example, Table 1, Table 2C, Table 2D, Table 3, Table 4A and 4B (below) for SNPs and markers that can form haplotypes that can be used as screening tools. These markers and SNPs can be identified in at-risk haploptypes. For example, an at-risk haplotype can include microsatellite markers and/or SNPs such as those set forth in Table 2C, Table 4B and 4B. The presence of the haplotype is indicative of stroke, or a susceptibility to stroke, and therefore is indicative of an individual who falls within a target population for the treatment methods described herein.

[0049] Haplotype analysis first involves defining a candidate susceptibility locus using LOD scores. The defined regions are then ultra-fine mapped with microsatellite markers with an average spacing between markers of less than 100 kb. All usable microsatellite markers that found in public databases and mapped within that region can be used. In addition, microsatellite markers identified within the deCODE genetics sequence assembly of the human genome can be used. The frequencies of haplotypes in the patient and the control groups using an expectation-maximization algorithm can be estimated (Dempster A. et al., 1977. J. R. Stat. Soc. B, 39:1-389). An implementation of this algorithm that can handle missing genotypes and uncertainty with the phase can be used. Under the null hypothesis, the patients and the controls are assumed to have identical frequencies. Using a likelihood approach, an alternative hypothesis where a candidate at-risk-haplotype, which can include the markers described herein, is allowed to have a higher frequency in patients than controls, while the ratios of the frequencies of other haplotypes are assumed to be the same in both groups is tested. Likelihoods are maximized separately under both hypotheses and a corresponding 1-df likelihood ratio statistics is used to evaluate the statistic significance.

[0050] To look for at-risk-haplotypes in the 1-lod drop or protective haplotypes, for example, association of all possible combinations of genotyped markers is studied, provided those markers span a practical region. The combined patient and control groups can be randomly divided into two sets, equal in size to the original group of patients and controls. The haplotype analysis is then repeated and the most significant p-value registered is determined. This randomization scheme can be repeated, for example, over 100 times to construct an empirical distribution of p-values.

[0051] In one embodiment, the at-risk haplotype is characterized by the presence of the polymorphism(s) represented by one or a combination of single nucleotide polymorphisms at nucleic acid positions 1425923, 1415979, 1414804, 1371388, 1307403 and 1257206, relative to SEQ ID NO: 1. In another embodiment, a diagnostic method for susceptibility to stroke can comprise determining the presence of at-risk haplotype represented by one or a combination of single nucleotide polymorphisms and microsatellite markers at nucleic acid positions 263539, 252772, 189780, 175259, 171240, 136550 and 120628, relative to SEQ ID NO: 1. In another embodiment, the at-risk haplotype is characterized by the following SNPs: SNP5PDM361194, SNP5PDM368135, SNP5PDM370640, SNP5PDM379372, and SNP5PDM408531. In one embodiment, the protective haplotype comprises the A allele of SNP45 at position 142780 relative to SEQ ID NO: 1. This haplotype is particularly useful for assessing susceptibility to the two major subtypes of ischemic stroke, carotid and cardiogenic stroke. In another embodiment, an at-risk haplotype, particularly for carotid and cardiogenic stroke, is characterized by use of microsatellite marker AC008818-1 to define the presence of an at-risk allele.

Nucleic Acid Therapeutic Agents

[0052] In another embodiment, a nucleic acid of the invention; a nucleic acid complementary to a nucleic acid of the invention; or a portion of such a nucleic acid (e.g., an oligonucleotide as described below); or a nucleic acid encoding a PDE4D polypeptide, can be used in “antisense” therapy, in which a nucleic acid (e.g., an oligonucleotide) which specifically hybridizes to the mRNA and/or genomic DNA of a nucleic acid is administered or generated in situ. The antisense nucleic acid that specifically hybridizes to the mRNA and/or DNA inhibits expression of the polypeptide encoded by that mRNA and/or DNA, e.g., by inhibiting translation and/or transcription. Binding of the antisense nucleic acid can be by conventional base pair complementarity, or, for example, in the case of binding to DNA duplexes, through specific interaction in the major groove of the double helix.

[0053] An antisense construct can be delivered, for example, as an expression plasmid as described above. When the plasmid is transcribed in the cell, it produces RNA that is complementary to a portion of the mRNA and/or DNA that encodes a PDE4D polypeptide. Alternatively, the antisense construct can be an oligonucleotide probe that is generated ex vivo and introduced into cells; it then inhibits expression by hybridizing with the mRNA and/or genomic DNA of the polypeptide. In one embodiment, the oligonucleotide probes are modified oligonucleotides that are resistant to endogenous nucleases, e.g., exonucleases and/or endonucleases, thereby rendering them stable in vivo. Exemplary nucleic acid molecules for use as antisense oligonucleotides are phosphoramidate, phosphothioate and methylphosphonate analogs of DNA (see also U.S. Pat. Nos. 5,176,996, 5,264,564 and 5,256,775). Additionally, general approaches to constructing oligomers useful in antisense therapy are also described, for example, by Van der Krol et al. (Biotechniques 6:958-976 (1988)); and Stein et al. (Cancer Res. 48:2659-2668 (1988)). With respect to antisense DNA, oligodeoxyribonucleotides derived from the translation initiation site are preferred.

[0054] To perform antisense therapy, oligonucleotides (mRNA, cDNA or DNA) are designed that are complementary to mRNA encoding the polypeptide. The antisense oligonucleotides bind to mRNA transcripts and prevent translation. Absolute complementarity, although preferred, is not required. A sequence “complementary” to a portion of an RNA, as referred to herein, indicates that a sequence has sufficient complementarity to be able to hybridize with the RNA, forming a stable duplex; in the case of double-stranded antisense nucleic acids, a single strand of the duplex DNA may thus be tested, or triplex formation may be assayed. The ability to hybridize will depend on both the degree of complementarity and the length of the antisense nucleic acid, as described in detail above. Generally, the longer the hybridizing nucleic acid, the more base mismatches with an RNA it may contain and still form a stable duplex (or triplex, as the case may be). One skilled in the art can ascertain a tolerable degree of mismatch by use of standard procedures.

[0055] The oligonucleotides used in antisense therapy can be DNA, RNA, or chimeric mixtures or derivatives or modified versions thereof, single-stranded or double-stranded. The oligonucleotides can be modified at the base moiety, sugar moiety, or phosphate backbone, for example, to improve stability of the molecule, hybridization, etc. The oligonucleotides can include other appended groups such as peptides (e.g. for targeting host cell receptors in vivo), or agents facilitating transport across the cell membrane (see, e.g., Letsinger et al., Proc. Natl. Acad. Sci. USA 86:6553-6556 (1989); Lemaitre et al., Proc. Natl. Acad. Sci. USA 84:648-652 (1987); PCT International Publication No. WO 88/09810) or the blood-brain barrier (see, e.g., PCT International Publication No. WO 89/10134), or hybridization-triggered cleavage agents (see, e.g., Krol et al., BioTechniques 6:958-976 (1988)) or intercalating agents. (See, e.g., Zon, Pharm. Res. 5: 539-549 (1988)). To this end, the oligonucleotide may be conjugated to another molecule (e.g., a peptide, hybridization triggered cross-linking agent, transport agent, hybridization-triggered cleavage agent).

[0056] The antisense molecules are delivered to cells that express a PDE4D polypeptide in vivo. A number of methods can be used for delivering antisense DNA or RNA to cells; e.g., antisense molecules can be injected directly into the tissue site, or modified antisense molecules, designed to target the desired cells (e.g., antisense linked to peptides or antibodies that specifically bind receptors or antigens expressed on the target cell surface) can be administered systematically. Alternatively, in a another embodiment, a recombinant DNA construct is utilized in which the antisense oligonucleotide is placed under the control of a strong promoter (e.g., pol III or pol II). The use of such a construct to transfect target cells in the patient results in the transcription of sufficient amounts of single stranded RNAs that will form complementary base pairs with the endogenous transcripts and thereby prevent translation of the mRNA. For example, a vector can be introduced in vivo such that it is taken up by a cell and directs the transcription of an antisense RNA. Such a vector can remain episomal or become chromosomally integrated, as long as it can be transcribed to produce the desired antisense RNA. Such vectors can be constructed by recombinant DNA technology methods standard in the art and described above. For example, a plasmid, cosmid, YAC or viral vector can be used to prepare the recombinant DNA construct that can be introduced directly into the tissue site. Alternatively, viral vectors can be used which selectively infect the desired tissue, in which case administration may be accomplished by another route (e.g., systemically).

[0057] In another embodiment of the invention, small double-stranded interfering RNA (RNA interference (RNAi)) can be used. RNAi is a post-transcription process, in which double-stranded RNA is introduced, and sequence-specific gene silencing results, though catalytic degradation of the targeted mRNA. See, e.g., Elbashir, S. M. et al., Nature 411:494-498 (2001); Lee, N. S., Nature Biotech. 19:500-505 (2002); Lee, S-K. et al., Nature Medicine 8(7):681-686 (2002); the entire teachings of these references are incorporated herein by reference.

[0058] Endogenous expression of a gene product can also be reduced by inactivating or “knocking out” the gene or its promoter using targeted homologous recombination (e.g., see Smithies et al., Nature 317:230-234 (1985); Thomas & Capecchi, Cell 51:503-512 (1987); Thompson et al., Cell 5:313-321 (1989)). For example, an altered, non-functional gene (or a completely unrelated DNA sequence) flanked by DNA homologous to the endogenous gene (either the coding regions or regulatory regions of the gene) can be used, with or without a selectable marker and/or a negative selectable marker, to transfect cells that express the gene in vivo. Insertion of the DNA construct, via targeted homologous recombination, results in inactivation of the gene. The recombinant DNA constructs can be directly administered or targeted to the required site in vivo using appropriate vectors, as described above. Alternatively, expression of non-altered genes can be increased using a similar method: targeted homologous recombination can be used to insert a DNA construct comprising a non-altered functional gene, or the complement thereof, or a portion thereof, in place of an gene in the cell, as described above. In another embodiment, targeted homologous recombination can be used to insert a DNA construct comprising a nucleic acid that encodes a polypeptide variant that differs from that present in the cell.

[0059] Alternatively, endogenous expression of a gene product can be reduced by targeting deoxyribonucleotide sequences complementary to the regulatory region (i.e., the promoter and/or enhancers) to form triple helical structures that prevent transcription of the gene in target cells in the body. (See generally, Helene, C., Anticancer Drug Des., 6(6):569-84 (1991); Helene, C. et al., Ann. N.Y. Acad. Sci. 660:27-36 (1992); and Maher, L. J., Bioassays 14(12):807-15 (1992)). Likewise, the antisense constructs described herein, by antagonizing the normal biological activity of the gene product, can be used in the manipulation of tissue, e.g., tissue differentiation, both in vivo and for ex vivo tissue cultures. Furthermore, the anti-sense techniques (e.g., microinjection of antisense molecules, or transfection with plasmids whose transcripts are anti-sense with regard to a nucleic acid RNA or nucleic acid sequence) can be used to investigate the role of one or more members of the PDE4D pathway in the development of disease-related conditions. Such techniques can be utilized in cell culture, but can also be used in the creation of transgenic animals.

[0060] The therapeutic agents as described herein can be delivered in a composition, as described above, or alone. They can be administered systemically, or can be targeted to a particular tissue. The therapeutic agents can be produced by a variety of means, including chemical synthesis; recombinant production; in vivo production (e.g., a transgenic animal, such as U.S. Pat. No. 4,873,316 to Meade et al.), for example, and can be isolated using standard means such as those described herein. In addition, a combination of any of the above methods of treatment (e.g., administration of non-altered polypeptide in conjunction with antisense therapy targeting altered mRNA; administration of a first splicing variant in conjunction with antisense therapy targeting a second splicing variant) can also be used.

[0061] The invention additionally pertains to use of such therapeutic agents, as described herein, for the manufacture of a medicament for the treatment of stroke, TIA, MI, and/or atherosclerosis, e.g., using the methods described herein.

Monitoring Progress of Treatment

[0062] The current invention also pertains to methods of monitoring the effectiveness of treatment on the regulation of expression (e.g., relative or absolute expression) of one or more PDE4D isoforms at the RNA or protein level or its enzymatic activity. PDE4D message or protein or enzymatic activity can be measured in a sample of peripheral blood or cells derived therefrom. An assessment of the levels of expression or activity can be made before and during treatment with PDE4D therapeutic agents.

[0063] For example, in one embodiment of the invention, an individual who is a member of the target population can be assessed for response to treatment with a PDE4D inhibitor, by examining cAMP levels or PDE4D enzymatic activity or absolute and/or relative levels of PDE4D protein or mRNA isoforms in peripheral blood in general or specific cell subfractions or combination of cell subfractions. In addition, variation such as haplotypes or mutations within or near (within 100 to 200 kb) of the PDE4D gene may be used to identify individuals who are at higher risk for stroke or TIA to increase the power and efficiency of clinical trials for pharmaceutical agents to prevent or treat first or subsequent stroke. The haplotypes and other variations may be used to exclude or fractionate patients in a clinical trial who are likely to have non-cAMP or non-PDE4D pathway involvement in their stroke risk in order to enrich patients who have other pathways involved and boost the power and sensitivity of the clinical trial. Such variation may be used as a pharmacogenomic test to guide selection of pharmaceutical agents for individuals.

Nucleic Acids of the Invention

Nucleic Acids, Portions and Variants

[0064] All nucleotide positions are relative to SEQ ID NO: 1. The nucleic acids, polypeptides and antibodies described herein can be used in methods of diagnosis of susceptibility to stroke, as well as in kits useful for diagnosis of a susceptibility to stroke. In addition, the invention pertains to isolated nucleic acid molecules comprising a human PDE4D nucleic acid. The term, “PDE4D nucleic acid,” as used herein, refers to an isolated nucleic acid molecule encoding PDE4D polypeptide. The PDE4D nucleic acid molecules of the present invention can be RNA, for example, mRNA, or DNA, such as cDNA and genomic DNA. DNA molecules can be double-stranded or single-stranded; single stranded RNA or DNA can be either the coding, or sense strand or the non-coding, or antisense strand. The nucleic acid molecule can include all or a portion of the coding sequence of the gene or nucleic acid and can further comprise additional non-coding sequences such as introns and non-coding 3′ and 5′ sequences (including regulatory sequences, for example, as well as promoters, transcription enhancement elements, splice donor/acceptor sites, etc.). For example, a PDE4D nucleic acid can comprise the nucleic acid of SEQ ID NO: 1 which may optionally comprise at least one polymorphism as shown in Tables 11 and 12, the complement thereof, or to a portion or fragment of such an isolated nucleic acid molecule (e.g., cDNA or the nucleic acid) that encodes PDE4D polypeptide.

[0065] Additionally, the nucleic acid molecules of the invention can be fused to a marker sequence, for example, a sequence that encodes a polypeptide to assist in isolation or purification of the polypeptide. Such sequences include, but are not limited to, those that encode a glutathione-S-transferase (GST) fusion protein and those that encode a hemagglutinin A (HA) polypeptide marker from influenza.

[0066] An “isolated” nucleic acid molecule, as used herein, is one that is separated from nucleic acids that normally flank the gene or nucleotide sequence (as in genomic sequences) and/or has been completely or partially purified from other transcribed sequences (e.g., as in an RNA library). For example, an isolated nucleic acid of the invention may be substantially isolated with respect to the complex cellular milieu in which it naturally occurs, or culture medium when produced by recombinant techniques, or chemical precursors or other chemicals when chemically synthesized. In some instances, the isolated material will form part of a composition (for example, a crude extract containing other substances), buffer system or reagent mix. In other circumstances, the material may be purified to essential homogeneity, for example as determined by PAGE or column chromatography such as HPLC. Preferably, an isolated nucleic acid molecule comprises at least about 50, 80 or 90% (on a molar basis) of all macromolecular species present. With regard to genomic DNA, the term “isolated” also can refer to nucleic acid molecules that are separated from the chromosome with which the genomic DNA is naturally associated. For example, the isolated nucleic acid molecule can contain less than about 5 kb, 4 kb, 3 kb, 2 kb, 1 kb, 0.5 kb or 0.1 kb of nucleotides which flank the nucleic acid molecule in the genomic DNA of the cell from which the nucleic acid molecule is derived.

[0067] The nucleic acid molecule can be fused to other coding or regulatory sequences and still be considered isolated. Thus, recombinant DNA contained in a vector is included in the definition of “isolated” as used herein. Also, isolated nucleic acid molecules include recombinant DNA molecules in heterologous host cells, as well as partially or substantially purified DNA molecules in solution. “Isolated” nucleic acid molecules also encompass in vivo and in vitro RNA transcripts of the DNA molecules of the present invention. An isolated nucleic acid molecule or nucleotide sequence can include a nucleic acid molecule or nucleotide sequence that is synthesized chemically or by recombinant means. Therefore, recombinant DNA contained in a vector is included in the definition of “isolated” as used herein. Also, isolated nucleotide sequences include recombinant DNA molecules in heterologous organisms, as well as partially or substantially purified DNA molecules in solution. In vivo and in vitro RNA transcripts of the DNA molecules of the present invention are also encompassed by “isolated” nucleotide sequences. Such isolated nucleotide sequences are useful in the manufacture of the encoded polypeptide, as probes for isolating homologous sequences (e.g., from other mammalian species), for gene mapping (e.g., by in situ hybridization with chromosomes), or for detecting expression of the gene in tissue (e.g., human tissue), such as by Northern blot analysis.

[0068] The present invention also pertains to variant nucleic acid molecules which are not necessarily found in nature but which encode a PDE4D polypeptide (e.g., a polypeptide having the amino acid sequence of SEQ ID NO: 2, 3, 4, 5, 6, 7, 8, 9, 10, 12 or 14), or another splicing variant of PDE4D polypeptide or polymorphic variant thereof. Thus, for example, DNA molecules which comprise a sequence that is different from the naturally-occurring nucleotide sequence but which, due to the degeneracy of the genetic code, encode a PDE4D polypeptide of the present invention are also the subject of this invention. The invention also encompasses nucleotide sequences encoding portions (fragments), or encoding variant polypeptides such as analogues or derivatives of the PDE4D polypeptide. Such variants can be naturally-occurring, such as in the case of allelic variation or single nucleotide polymorphisms, or non-naturally-occurring, such as those induced by various mutagens and mutagenic processes. Intended variations include, but are not limited to, addition, deletion and substitution of one or more nucleotides that can result in conservative or non-conservative amino acid changes, including additions and deletions. Preferably the nucleotide (and/or resultant amino acid) changes are silent or conserved; that is, they do not alter the characteristics or activity of the PDE4D polypeptide. In one embodiment, the nucleotide sequences are fragments that comprise one or more polymorphic microsatellite markers. In another embodiment, the nucleotide sequences are fragments that comprise one or more single nucleotide polymorphisms in the PDE4D gene.

[0069] Other alterations of the nucleic acid molecules of the invention can include, for example, labeling, methylation, internucleotide modifications such as uncharged linkages (e.g., methyl phosphonates, phosphotriesters, phosphoamidates, carbamates), charged linkages (e.g., phosphorothioates, phosphorodithioates), pendent moieties (e.g., polypeptides), intercalators (e.g., acridine, psoralen), chelators, alkylators, and modified linkages (e.g., alpha anomeric nucleic acids). Also included are synthetic molecules that mimic nucleic acid molecules in the ability to bind to a designated sequence via hydrogen bonding and other chemical interactions. Such molecules include, for example, those in which peptide linkages substitute for phosphate linkages in the backbone of the molecule.

[0070] The invention also pertains to nucleic acid molecules that hybridize under high stringency hybridization conditions, such as for selective hybridization, to a nucleotide sequence described herein (e.g., nucleic acid molecules which specifically hybridize to a nucleotide sequence encoding polypeptides described herein, and, optionally, have an activity of the polypeptide). In one embodiment, the invention includes variants described herein which hybridize under high stringency hybridization conditions (e.g., for selective hybridization) to a nucleotide sequence comprising a nucleotide sequence selected from SEQ ID NO: 1 which may optionally comprise at least one polymorphism as shown in Tables 11 and 12 or the complement thereof. In another embodiment, the invention includes variants described herein which hybridize under high stringency hybridization conditions (e.g., for selective hybridization) to a nucleotide sequence encoding an amino acid sequence selected from SEQ ID NO: 2, 3, 4, 5, 6, 7, 8, 9, 10, 12 or 14 or polymorphic variant thereof. In another embodiment, the protein product of the variant that hybridizes under high stringency conditions has an activity of PDE4D.

[0071] Such nucleic acid molecules can be detected and/or isolated by specific hybridization (e.g., under high stringency conditions). “Specific hybridization,” as used herein, refers to the ability of a first nucleic acid to hybridize to a second nucleic acid in a manner such that the first nucleic acid does not hybridize to any nucleic acid other than to the second nucleic acid (e.g., when the first nucleic acid has a higher similarity to the second nucleic acid than to any other nucleic acid in a sample wherein the hybridization is to be performed). “Stringency conditions” for hybridization is a term of art which refers to the incubation and wash conditions, e.g., conditions of temperature and buffer concentration, which permit hybridization of a particular nucleic acid to a second nucleic acid; the first nucleic acid may be perfectly (i.e., 100%) complementary to the second, or the first and second may share some degree of complementarity which is less than perfect (e.g., 70%, 75%, 85%, 95%). For example, certain high stringency conditions can be used which distinguish perfectly complementary nucleic acids from those of less complementarity. “High stringency conditions”, “moderate stringency conditions” and “low stringency conditions” for nucleic acid hybridizations are explained on pages 2.10.1-2.10.16 and pages 6.3.1-6.3.6 in Current Protocols in Molecular Biology (Ausubel, F. M. et al., “Current Protocols in Molecular Biology”, John Wiley & Sons, (1998), the entire teachings of which are incorporated by reference herein). The exact conditions which determine the stringency of hybridization depend not only on ionic strength (e.g., 0.2×SSC, 0.1×SSC), temperature (e.g., room temperature, 42° C., 68° C.) and the concentration of destabilizing agents such as formamide or denaturing agents such as SDS, but also on factors such as the length of the nucleic acid sequence, base composition, percent mismatch between hybridizing sequences and the frequency of occurrence of subsets of that sequence within other non-identical sequences. Thus, equivalent conditions can be determined by varying one or more of these parameters while maintaining a similar degree of identity or similarity between the two nucleic acid molecules. Typically, conditions are used such that sequences at least about 60%, at least about 70%, at least about 80%, at least about 90% or at least about 95% or more identical to each other remain hybridized to one another. By varying hybridization conditions from a level of stringency at which no hybridization occurs to a level at which hybridization is first observed, conditions which will allow a given sequence to hybridize (e.g., selectively) with the most similar sequences in the sample can be determined.

[0072] Exemplary conditions are described in Krause, M. H. and S. A. Aaronson, Methods in Enzymology, 200:546-556 (1991). Also, in, Ausubel, et al., “Current Protocols in Molecular Biology”, John Wiley & Sons, (1998), which describes the determination of washing conditions for moderate or low stringency conditions. Washing is the step in which conditions are usually set so as to determine a minimum level of complementarity of the hybrids. Generally, starting from the lowest temperature at which only homologous hybridization occurs, each ° C. by which the final wash temperature is reduced (holding SSC concentration constant) allows an increase by 1% in the maximum extent of mismatching among the sequences that hybridize. Generally, doubling the concentration of SSC results in an increase in Tₘ of ˜17° C. Using these guidelines, the washing temperature can be determined empirically for high, moderate or low stringency, depending on the level of mismatch sought.

[0073] For example, a low stringency wash can comprise washing in a solution containing 0.2×SSC/0.1% SDS for 10 min at room temperature; a moderate stringency wash can comprise washing in a prewarmed solution (42° C.) solution containing 0.2×SSC/0.1% SDS for 15 min at 42° C.; and a high stringency wash can comprise washing in prewarmed (68° C.) solution containing 0.1×SSC/0.1% SDS for 15 min at 68° C. Furthermore, washes can be performed repeatedly or sequentially to obtain a desired result as known in the art. Equivalent conditions can be determined by varying one or more of the parameters given as an example, as known in the art, while maintaining a similar degree of identity or similarity between the target nucleic acid molecule and the primer or probe used.

[0074] The percent homology or identity of two nucleotide or amino acid sequences can be determined by aligning the sequences for optimal comparison purposes (e.g., gaps can be introduced in the sequence of a first sequence for optimal alignment). The nucleotides or amino acids at corresponding positions are then compared, and the percent identity between the two sequences is a function of the number of identical positions shared by the sequences (i.e., % identity=# of identical positions/total # of positions×100). When a position in one sequence is occupied by the same nucleotide or amino acid residue as the corresponding position in the other sequence, then the molecules are homologous at that position. As used herein, nucleic acid or amino acid “homology” is equivalent to nucleic acid or amino acid “identity”. In certain embodiments, the length of a sequence aligned for comparison purposes is at least 30%, for example, at least 40%, in certain embodiments at least 60%, and in other embodiments at least 70%, 80%, 90% or 95% of the length of the reference sequence. The actual comparison of the two sequences can be accomplished by well-known methods, for example, using a mathematical algorithm. One, non-limiting example of such a mathematical algorithm is described in Karlin et al., Proc. Natl. Acad. Sci. USA 90:5873-5877 (1993). Such an algorithm is incorporated into the NBLAST and XBLAST programs (version 2.0) as described in Altschul et al., Nucleic Acids Res. 25:389-3402 (1997). When utilizing BLAST and Gapped BLAST programs, the default parameters of the respective programs (e.g., NBLAST) can be used. In one embodiment, parameters for sequence comparison can be set at score=100, wordlength=12, or can be varied (e.g., W=5 or W=20).

[0075] Another preferred non-limiting example of a mathematical algorithm utilized for the comparison of sequences is the algorithm of Myers and Miller, CABIOS (1989). Such an algorithm is incorporated into the ALIGN program (version 2.0) which is part of the GCG sequence alignment software package. When utilizing the ALIGN program for comparing amino acid sequences, a PAM120 weight residue table, a gap length penalty of 12, and a gap penalty of 4 can be used. Additional algorithms for sequence analysis are known in the art and include ADVANCE and ADAM as described in Torellis and Robotti (1994) Comput. Appl. Biosci., 10:3-5; and FASTA described in Pearson and Lipman (1988) PNAS, 85:2444-8.

[0076] In another embodiment, the percent identity between two amino acid sequences can be accomplished using the GAP program in the GCG software package (Accelrys, Cambridge, UK) using either a Blossom 63 matrix or a PAM250 matrix, and a gap weight of 12, 10, 8, 6, or 4 and a length weight of 2, 3, or 4. In yet another embodiment, the percent identity between two nucleic acid sequences can be accomplished using the GAP program in the GCG software package, using a gap weight of 50 and a length weight of 3.

[0077] The present invention also provides isolated nucleic acid molecules that contain a fragment or portion that hybridizes under highly stringent conditions to a nucleotide sequence comprising a nucleotide sequence selected from SEQ ID NO: 1 which may optionally comprise at least one polymorphism as shown in Tables 11 and 12 and the complement thereof, and also provides isolated nucleic acid molecules that contain a fragment or portion that hybridizes under highly stringent conditions to a nucleotide sequence encoding an amino acid sequence selected from SEQ ID NO: 2, 3, 4, 5, 6, 7, 8, 9, 10, 12 or 14, or polymorphic variant thereof. The nucleic acid fragments of the invention are at least about 15, preferably at least about 18, 20, 23 or 25 nucleotides, and can be 30, 40, 50, 100, 200 or more nucleotides in length. Longer fragments, for example, 30 or more nucleotides in length, which encode antigenic polypeptides described herein are particularly useful, such as for the generation of antibodies as described below.

Probes and Primers

[0078] In a related aspect, the nucleic acid fragments of the invention are used as probes or primers in assays such as those described herein. “Probes” or “primers” are oligonucleotides that hybridize in a base-specific manner to a complementary strand of nucleic acid molecules. By “base specific manner” is meant that the two sequences must have a degree of nucleotide complementarity sufficient for the primer or probe to hybridize. Accordingly, the primer or probe sequence is not required to be perfectly complementary to the sequence of the template. Non-complementary bases or modified bases can be interspersed into the primer or probe, provided that base substitutions do not inhibit hybridization. The nucleic acid template may also include “non-specific priming sequences” or “nonspecific sequences” to which the primer or probe has varying degrees of complementarities. Such probes and primers include polypeptide nucleic acids, as described in Nielsen et al., Science, 254, 1497-1500 (1991).

[0079] A probe or primer comprises a region of nucleic acid that hybridizes to at least about 15, for example about 20-25, and in certain embodiments about 40, 50 or 75, consecutive nucleotides of a nucleic acid of the invention, such as a nucleic acid comprising a contiguous nucleic acid sequence of SEQ ID NO: 1 or the complement of SEQ ID NO: 1, or a nucleic acid sequence encoding an amino acid sequence of SEQ ID NO: 2, 3, 4, 5, 6, 7, 8, 9, 10, 12 or 14, or polymorphic variant thereof. In certain embodiments, a probe or primer comprises 100 or fewer nucleotides, in certain embodiments, from 6 to 50 nucleotides, for example, from 12 to 30 nucleotides. In other embodiments, the probe or primer is at least 70% identical to the contiguous nucleic acid sequence or to the complement of the contiguous nucleotide sequence, for example, at least 80% identical, in certain embodiments at least 90% identical, and in other embodiments at least 95% identical, or even capable of selectively hybridizing to the contiguous nucleic acid sequence or to the complement of the contiguous nucleotide sequence. Often, the probe or primer further comprises a label, e.g., radioisotope, fluorescent compound, enzyme, or enzyme co-factor.

[0080] The nucleic acid molecules of the invention such as those described above can be identified and isolated using standard molecular biology techniques and the sequence information provided herein. For example, nucleic acid molecules can be amplified and isolated by the polymerase chain reaction using synthetic oligonucleotide primers designed based on one or more of the sequences provided in SEQ ID NO: 1 which may optionally comprise at least one polymorphism shown in Tables 11 and 12, and/or the complement thereof, or designed based on nucleotides based on sequences encoding one or more of the amino acid sequences provided herein. See generally PCR Technology: Principles and Applications for DNA Amplification (ed. H. A. Erlich, Freeman Press, NY, N.Y., 1992); PCR Protocols: A Guide to Methods and Applications (Eds. Innis, et al., Academic Press, San Diego, Calif., 1990); Mattila et al., Nucleic Acids Res., 19:4967 (1991); Eckert et al., PCR Methods and Applications, 1:17 (1991); PCR (eds. McPherson et al., IRL Press, Oxford); and U.S. Pat. No. 4,683,202. The nucleic acid molecules can be amplified using cDNA, mRNA or genomic DNA as a template, cloned into an appropriate vector and characterized by DNA sequence analysis.

[0081] Other suitable amplification methods include the ligase chain reaction (LCR) (see Wu and Wallace, Genomics, 4:560 (1989), Landegren et al., Science, 241:1077 (1988), transcription amplification (Kwoh-et al., Proc. Natl. Acad. Sci. USA, 86:1173 (1989)), and self-sustained sequence replication (Guatelli et al., Proc. Nat. Acad. Sci. USA, 87:1874 (1990)) and nucleic acid based sequence amplification (NASBA). The latter two amplification methods involve isothermal reactions based on isothermal transcription, which produce both single stranded RNA (ssRNA) and double stranded DNA (dsDNA) as the amplification products in a ratio of about 30 or 100 to 1, respectively.

[0082] The amplified DNA can be labeled (e.g., with radiolabel or other reporter molecule) and used as a probe for screening a cDNA library derived from human cells, mRNA in zap express, ZIPLOX or other suitable vector. Corresponding clones can be isolated, DNA can obtained following in vivo excision, and the cloned insert can be sequenced in either or both orientations by art recognized methods to identify the correct reading frame encoding a polypeptide of the appropriate molecular weight. For example, the direct analysis of the nucleotide sequence of nucleic acid molecules of the present invention can be accomplished using well-known methods that are commercially available. See, for example, Sambrook et al., Molecular Cloning, A Laboratory Manual (2nd Ed., CSHP, New York 1989); Zyskind et al., Recombinant DNA Laboratory Manual, (Acad. Press, 1988)). Using these or similar methods, the polypeptide and the DNA encoding the polypeptide can be isolated, sequenced and further characterized.

[0083] Antisense nucleic acid molecules of the invention can be designed using the nucleotide sequences of SEQ ID NO: 1 and/or the complement of SEQ ID NO: 1, and/or a portion of SEQ ID NO: 1 or the complement of SEQ ID NO: 1 and/or a sequence encoding the amino acid sequences or SEQ ID NO: 2, 3, 4, 5, 6, 7, 8, 9, 10, 12 and/or 14, or encoding a portion of SEQ ID NO: 2, 3, 4, 5, 6, 7, 8, 9, 10, 12 and/or 14, (wherein any one of these may optionally comprise at least one polymorphism as shown in Tables 11 and 12) and constructed using chemical synthesis and enzymatic ligation reactions using procedures known in the art. For example, an antisense nucleic acid molecule (e.g., an antisense oligonucleotide) can be chemically synthesized using naturally occurring nucleotides or variously modified nucleotides designed to increase the biological stability of the molecules or to increase the physical stability of the duplex formed between the antisense and sense nucleic acids, e.g., phosphorothioate derivatives and acridine substituted nucleotides can be used. Alternatively, the antisense nucleic acid molecule can be produced biologically using an expression vector into which a nucleic acid molecule has been subcloned in an antisense orientation (i.e., RNA transcribed from the inserted nucleic acid molecule will be of an antisense orientation to a target nucleic acid of interest).

[0084] In general, the isolated nucleic acid sequences of the invention can be used as molecular weight markers on Southern gels, and as chromosome markers that are labeled to map related gene positions. The nucleic acid sequences can also be used to compare with endogenous DNA sequences in patients to identify genetic disorders (e.g., a predisposition for or susceptibility to stroke), and as probes, such as to hybridize and discover related DNA sequences or to subtract out known sequences from a sample. The nucleic acid sequences can further be used to derive primers for genetic fingerprinting, to raise anti-polypeptide antibodies using DNA immunization techniques, and as an antigen to raise anti-DNA antibodies or elicit immune responses. Portions or fragments of the nucleotide sequences identified herein (and the corresponding complete gene sequences) can be used in numerous ways as polynucleotide reagents. For example, these sequences can be used to: (i) map their respective genes on a chromosome; and, thus, locate gene regions associated with genetic disease; (ii) identify an individual from a minute biological sample (tissue typing); and (iii) aid in forensic identification of a biological sample. Additionally, the nucleotide sequences of the invention can be used to identify and express recombinant polypeptides for analysis, characterization or therapeutic use, or as markers for tissues in which the corresponding polypeptide is expressed, either constitutively, during tissue differentiation, or in diseased states. The nucleic acid sequences can additionally be used as reagents in the screening and/or diagnostic assays described herein, and can also be included as components of kits (e.g., reagent kits) for use in the screening and/or diagnostic assays described herein.

Vectors

[0085] Another aspect of the invention pertains to nucleic acid constructs containing a nucleic acid molecule selected from the group consisting of SEQ ID NO: 1 which may optionally comprise at least one polymorphism shown in Tables 11 and 12 and the complement thereof (or a portion thereof). Yet another aspect of the invention pertains to nucleic acid constructs containing a nucleic acid molecule encoding the amino acid sequence of SEQ ID NO: 2, 3, 4, 5, 6, 7, 8, 9, 10, 12 or 14 or polymorphic variant thereof. The constructs comprise a vector (e.g., an expression vector) into which a sequence of the invention has been inserted in a sense or antisense orientation. As used herein, the term “vector” refers to a nucleic acid molecule capable of transporting another nucleic acid to which it has been linked. One type of vector is a “plasmid”, which refers to a circular double stranded DNA loop into which additional DNA segments can be ligated. Another type of vector is a viral vector, wherein additional DNA segments can be ligated into the viral genome. Certain vectors are capable of autonomous replication in a host cell into which they are introduced (e.g., bacterial vectors having a bacterial origin of replication and episomal mammalian vectors). Other vectors (e.g., non-episomal mammalian vectors) are integrated into the genome of a host cell upon introduction into the host cell, and thereby are replicated along with the host genome. Moreover, certain vectors, expression vectors, are capable of directing the expression of genes to which they are operably linked. In general, expression vectors of utility in recombinant DNA techniques are often in the form of plasmids. However, the invention is intended to include such other forms of expression vectors, such as viral vectors (e.g., replication defective retroviruses, adenoviruses and adeno-associated viruses) that serve equivalent functions.

[0086] Preferred recombinant expression vectors of the invention comprise a nucleic acid molecule of the invention in a form suitable for expression of the nucleic acid molecule in a host cell. This means that the recombinant expression vectors include one or more regulatory sequences, selected on the basis of the host cells to be used for expression, which is operably linked to the nucleic acid sequence to be expressed. Within a recombinant expression vector, “operably or operatively linked” is intended to mean that the nucleotide sequence of interest is linked to the regulatory sequence(s) in a manner which allows for expression of the nucleotide sequence (e.g., in an in vitro transcription/translation system or in a host cell when the vector is introduced into the host cell). The term “regulatory sequence” is intended to include promoters, enhancers and other expression control elements (e.g., polyadenylation signals). Such regulatory sequences are described, for example, in Goeddel, Gene Expression Technology: Methods in Enzymology 185, Academic Press, San Diego, Calif. (1990). Regulatory sequences include those which direct constitutive expression of a nucleotide sequence in many types of host cell and those which direct expression of the nucleotide sequence only in certain host cells (e.g., tissue-specific regulatory sequences). It will be appreciated by those skilled in the art that the design of the expression vector can depend on such factors as the choice of the host cell to be transformed and the level of expression of polypeptide desired. The expression vectors of the invention can be introduced into host cells to thereby produce polypeptides, including fusion polypeptides, encoded by nucleic acid molecules as described herein.

[0087] The recombinant expression vectors of the invention can be designed for expression of a polypeptide of the invention in prokaryotic or eukaryotic cells, e.g., bacterial cells such as E. coli, insect cells (using baculovirus expression vectors), yeast cells or mammalian cells. Suitable host cells are discussed further in Goeddel, supra. Alternatively, the recombinant expression vector can be transcribed and translated in vitro, for example using T7 promoter regulatory sequences and T7 polymerase.

[0088] Another aspect of the invention pertains to host cells into which a recombinant expression vector of the invention has been introduced. The terms “host cell” and “recombinant host cell” are used interchangeably herein. It is understood that such terms refer not only to the particular subject cell but also to the progeny or potential progeny of such a cell. Because certain modifications may occur in succeeding generations due to either mutation or environmental influences, such progeny may not, in fact, be identical to the parent cell, but are still included within the scope of the term as used herein.

[0089] A host cell can be any prokaryotic or eukaryotic cell. For example, a nucleic acid molecule of the invention can be expressed in bacterial cells (e.g., E. coli), insect cells, yeast or mammalian cells (such as Chinese hamster ovary cells (CHO) or COS cells). Other suitable host cells are known to those skilled in the art.

[0090] Vector DNA can be introduced into prokaryotic or eukaryotic cells via conventional transformation or transfection techniques. As used herein, the terms “transformation” and “transfection” are intended to refer to a variety of art-recognized techniques for introducing a foreign nucleic acid molecule (e.g., DNA) into a host cell, including calcium phosphate or calcium chloride co-precipitation, DEAE-dextran-mediated transfection, lipofection, or electroporation. Suitable methods for transforming or transfecting host cells can be found in Sambrook, et al., (supra), and other laboratory manuals.

[0091] For stable transfection of mammalian cells, it is known that, depending upon the expression vector and transfection technique used, only a small fraction of cells may integrate the foreign DNA into their genome. In order to identify and select these integrants, a gene that encodes a selectable marker (e.g., for resistance to antibiotics) is generally introduced into the host cells along with the gene of interest. Preferred selectable markers include those that confer resistance to drugs, such as G418, hygromycin and methotrexate. Nucleic acid molecules encoding a selectable marker can be introduced into a host cell on the same vector as the nucleic acid molecule of the invention or can be introduced on a separate vector. Cells stably transfected with the introduced nucleic acid molecule can be identified by drug selection (e.g., cells that have incorporated the selectable marker gene will survive, while the other cells die).

[0092] A host cell of the invention, such as a prokaryotic or eukaryotic host cell in culture, can be used to produce (i.e., express) a polypeptide of the invention. Accordingly, the invention further provides methods for producing a polypeptide using the host cells of the invention. In one embodiment, the method comprises culturing the host cell of invention (into which a recombinant expression vector encoding a polypeptide of the invention has been introduced) in a suitable medium such that the polypeptide is produced. In another embodiment, the method further comprises isolating the polypeptide from the medium or the host cell.

[0093] The host cells of the invention can also be used to produce nonhuman transgenic animals. For example, in one embodiment, a host cell of the invention is a fertilized oocyte or an embryonic stem cell into which a nucleic acid molecule of the invention has been introduced (e.g., an exogenous PDE4D gene, or an exogenous nucleic acid encoding PDE4D polypeptide). Such host cells can then be used to create non-human transgenic animals in which exogenous nucleotide sequences have been introduced into the genome or homologous recombinant animals in which endogenous nucleotide sequences have been altered. Such animals are useful for studying the function and/or activity of the nucleotide sequence and polypeptide encoded by the sequence and for identifying and/or evaluating modulators of their activity. As used herein, a “transgenic animal” is a non-human animal, preferably a mammal, more preferably a rodent such as a rat or mouse, in which one or more of the cells of the animal include a transgene. Other examples of transgenic animals include non-human primates, sheep, dogs, cows, goats, chickens and amphibians. A transgene is exogenous DNA which is integrated into the genome of a cell from which a transgenic animal develops and which remains in the genome of the mature animal, thereby directing the expression of an encoded gene product in one or more cell types or tissues of the transgenic animal. As used herein, an “homologous recombinant animal” is a non-human animal, preferably a mammal, more preferably a mouse, in which an endogenous gene has been altered by homologous recombination between the endogenous gene and an exogenous DNA molecule introduced into a cell of the animal, e.g., an embryonic cell of the animal, prior to development of the animal.

[0094] Methods for generating transgenic animals via embryo manipulation and microinjection, particularly animals such as mice, have become conventional in the art and are described, for example, in U.S. Pat. Nos. 4,736,866 and 4,870,009, U.S. Pat. No. 4,873,191 and in Hogan, Manipulating the Mouse Embryo (Cold Spring Harbor Laboratory Press, Cold Spring Harbor, N.Y., 1986). Methods for constructing homologous recombination vectors and homologous recombinant animals are described further in Bradley (1991) Current Opinion in Bio/Technology, 2:823-829 and in PCT Publication Nos. WO 90/11354, WO 91/01140, WO 92/0968, and WO 93/04169. Clones of the non-human transgenic animals described herein can also be produced according to the methods described in Wilmut et al. (1997) Nature, 385:810-813 and PCT Publication Nos. WO 97/07668 and WO 97/07669.

Polypeptides of the Invention

[0095] The present invention also pertains to isolated polypeptides encoded by PDE4D (“PDE4D polypeptides”) and fragments and variants thereof, as well as polypeptides encoded by nucleotide sequences described herein (e.g., other splicing variants). The term “polypeptide” refers to a polymer of amino acids, and not to a specific length; thus, peptides, oligopeptides and proteins are included within the definition of a polypeptide. As used herein, a polypeptide is said to be “isolated” or “purified” when it is substantially free of cellular material when it is isolated from recombinant and non-recombinant cells, or free of chemical precursors or other chemicals when it is chemically synthesized. A polypeptide, however, can be joined to another polypeptide with which it is not normally associated in a cell (e.g., in a “fusion protein”) and still be “isolated” or “purified.”

[0096] The polypeptides of the invention can be purified to homogeneity. It is understood, however, that preparations in which the polypeptide is not purified to homogeneity are useful. The critical feature is that the preparation allows for the desired function of the polypeptide, even in the presence of considerable amounts of other components. Thus, the invention encompasses various degrees of purity. In one embodiment, the language “substantially free of cellular material” includes preparations of the polypeptide having less than about 30% (by dry weight) other proteins (i.e., contaminating protein), less than about 20% other proteins, less than about 10% other proteins, or less than about 5% other proteins.

[0097] When a polypeptide is recombinantly produced, it can also be substantially free of culture medium, i.e., culture medium represents less than about 20%, less than about 10%, or less than about 5% of the volume of the polypeptide preparation. The language “substantially free of chemical precursors or other chemicals” includes preparations of the polypeptide in which it is separated from chemical precursors or other chemicals that are involved in its synthesis. In one embodiment, the language “substantially free of chemical precursors or other chemicals” includes preparations of the polypeptide having less than about 30% (by dry weight) chemical precursors or other chemicals, less than about 20% chemical precursors or other chemicals, less than about 10% chemical precursors or other chemicals, or less than about 5% chemical precursors or other chemicals.

[0098] In one embodiment, a polypeptide of the invention comprises an amino acid sequence encoded by a nucleic acid molecule comprising a nucleotide sequence selected from the group consisting of SEQ ID NO: 1 which may optionally comprise at least one polymorphism shown in Tables 11 and 12 and complements and portions thereof, e.g., SEQ ID NO: 2, 3, 4, 5, 6, 7, 8, 9, 10, 12 or 14, or a portion or polymorphic variant thereof. However, the polypeptides of the invention also encompass fragment and sequence variants. Variants include a substantially homologous polypeptide encoded by the same genetic locus in an organism, i.e., an allelic variant, as well as other splicing variants. Variants also encompass polypeptides derived from other genetic loci in an organism, but having substantial homology to a polypeptide encoded by a nucleic acid molecule comprising a nucleotide sequence selected from the group consisting of SEQ ID NO: 1 which may optionally comprise at least one polymorphism shown in Tables 11 and 12 and complements and portions thereof, or having substantial homology to a polypeptide encoded by a nucleic acid molecule comprising a nucleotide sequence selected from the group consisting of nucleotide sequences encoding SEQ ID NO: 2, 3, 4, 5, 6, 7, 8, 9, 10, 12 or 14, or polymorphic variants thereof. Variants also include polypeptides substantially homologous or identical to these polypeptides but derived from another organism, i.e., an ortholog. Variants also include polypeptides that are substantially homologous or identical to these polypeptides that are produced by chemical synthesis. Variants also include polypeptides that are substantially homologous or identical to these polypeptides that are produced by recombinant methods.

[0099] As used herein, two polypeptides (or a region of the polypeptides) are substantially homologous or identical when the amino acid sequences are at least about 45-55%, in certain embodiments at least about 70-75%, and in other embodiments at least about 80-85%, and in others greater than about 90% or more homologous or identical. A substantially homologous amino acid sequence, according to the present invention, will be encoded by a nucleic acid molecule hybridizing to SEQ ID NO: 1 which may optionally comprise at least one polymorphism shown in Tables 11 and 12, or portion thereof, under stringent conditions as more particularly described above, or will be encoded by a nucleic acid molecule hybridizing to a nucleic acid sequence encoding SEQ ID NO: 2, 3, 4, 5, 6, 7, 8, 9, 10, 12 or 14, portion thereof or polymorphic variant thereof, under stringent conditions as more particularly described thereof.

[0100] The invention also encompasses polypeptides having a lower degree of identity but having sufficient similarity so as to perform one or more of the same functions performed by a polypeptide encoded by a nucleic acid molecule of the invention. Similarity is determined by conserved amino acid substitution. Such substitutions are those that substitute a given amino acid in a polypeptide by another amino acid of like characteristics. Conservative substitutions are likely to be phenotypically silent. Typically seen as conservative substitutions are the replacements, one for another, among the aliphatic amino acids Ala, Val, Leu and Ile; interchange of the hydroxyl residues Ser and Thr, exchange of the acidic residues Asp and Glu, substitution between the amide residues Asn and Gln, exchange of the basic residues Lys and Arg and replacements among the aromatic residues Phe and Tyr. Guidance concerning which amino acid changes are likely to be phenotypically silent are found in Bowie et al., Science 247:1306-1310 (1990).

[0101] A variant polypeptide can differ in amino acid sequence by one or more substitutions, deletions, insertions, inversions, fusions, and truncations or a combination of any of these. Further, variant polypeptides can be fully functional or can lack function in one or more activities. Fully functional variants typically contain only conservative variation or variation in non-critical residues or in non-critical regions. Functional variants can also contain substitution of similar amino acids that result in no change or an insignificant change in function. Alternatively, such substitutions may positively or negatively affect function to some degree. Non-functional variants typically contain one or more non-conservative amino acid substitutions, deletions, insertions, inversions, or truncation or a substitution, insertion, inversion, or deletion in a critical residue or critical region.

[0102] Amino acids that are essential for function can be identified by methods known in the art, such as site-directed mutagenesis or alanine-scanning mutagenesis (Cunningham et al., Science, 244:1081-1085 (1989)). The latter procedure introduces single alanine mutations at every residue in the molecule. The resulting mutant molecules are then tested for biological activity in vitro, or in vitro proliferative activity. Sites that are critical for polypeptide activity can also be determined by structural analysis such as crystallization, nuclear magnetic resonance or photoaffinity labeling (Smith et al., J. Mol. Biol., 224:899-904 (1992); de Vos et al., Science, 255:306-312 (1992)).

[0103] The invention also includes polypeptide fragments of the polypeptides of the invention. Fragments can be derived from a polypeptide encoded by a nucleic acid molecule comprising SEQ ID NO: 1 which may optionally comprise at least one polymorphism shown in Tables 11 and 12 or a portion thereof and the complements thereof (e.g., SEQ ID NO: 2, 3, 4, 5, 6, 7, 8, 9, 10, 12 or 14, or other splicing variants). However, the invention also encompasses fragments of the variants of the polypeptides described herein. As used herein, a fragment comprises at least 6 contiguous amino acids. Useful fragments include those that retain one or more of the biological activities of the polypeptide as well as fragments that can be used as an immunogen to generate polypeptide-specific antibodies.

[0104] Biologically active fragments (peptides which are, for example, 6, 9, 12, 15, 16, 20, 30, 35, 36, 37, 38, 39, 40, 50, 100 or more amino acids in length) can comprise a domain, segment, or motif that has been identified by analysis of the polypeptide sequence using well-known methods, e.g., signal peptides, extracellular domains, one or more transmembrane segments or loops, ligand binding regions, zinc finger domains, DNA binding domains, acylation sites, glycosylation sites, or phosphorylation sites.

[0105] Fragments can be discrete (not fused to other amino acids or polypeptides) or can be within a larger polypeptide. Further, several fragments can be comprised within a single larger polypeptide. In one embodiment a fragment designed for expression in a host can have heterologous pre- and pro-polypeptide regions fused to the amino terminus of the polypeptide fragment and an additional region fused to the carboxyl terminus of the fragment.

[0106] The invention thus provides chimeric or fusion polypeptides. These comprise a polypeptide of the invention operatively linked to a heterologous protein or polypeptide having an amino acid sequence not substantially homologous to the polypeptide. “Operatively linked” indicates that the polypeptide and the heterologous protein are fused in-frame. The heterologous protein can be fused to the N-terminus or C-terminus of the polypeptide. In one embodiment the fusion polypeptide does not affect function of the polypeptide per se. For example, the fusion polypeptide can be a GST-fusion polypeptide in which the polypeptide sequences are fused to the C-terminus of the GST sequences. Other types of fusion polypeptides include, but are not limited to, enzymatic fusion polypeptides, for example β-galactosidase fusions, yeast two-hybrid GAL fusions, poly-His fusions and Ig fusions. Such fusion polypeptides, particularly poly-His fusions, can facilitate the purification of recombinant polypeptide. In certain host cells (e.g., mammalian host cells), expression and/or secretion of a polypeptide can be increased by using a heterologous signal sequence. Therefore, in another embodiment, the fusion polypeptide contains a heterologous signal sequence at its N-terminus.

[0107] EP-A-O 464 533 discloses fusion proteins comprising various portions of immunoglobulin constant regions. The Fc is useful in therapy and diagnosis and thus results, for example, in improved pharmacokinetic properties (EP-A 0232 262). In drug discovery, for example, human proteins have been fused with Fc portions for the purpose of high-throughput screening assays to identify antagonists. Bennett et al., Journal of Molecular Recognition, 8:52-58 (1995) and Johanson et al., The Journal of Biological Chemistry, 270,16:9459-9471 (1995). Thus, this invention also encompasses soluble fusion polypeptides containing a polypeptide of the invention and various portions of the constant regions of heavy or light chains of immunoglobulins of various subclasses (IgG, IgM, IgA, IgE).

[0108] A chimeric or fusion polypeptide can be produced by standard recombinant DNA techniques. For example, DNA fragments coding for the different polypeptide sequences are ligated together in-frame in accordance with conventional techniques. In another embodiment, the fusion gene can be synthesized by conventional techniques including automated DNA synthesizers. Alternatively, PCR amplification of nucleic acid fragments can be carried out using anchor primers which give rise to complementary overhangs between two consecutive nucleic acid fragments which can subsequently be annealed and re-amplified to generate a chimeric nucleic acid sequence (see Ausubel et al., Current Protocols in Molecular Biology, 1992). Moreover, many expression vectors are commercially available that already encode a fusion moiety (e.g., a GST protein). A nucleic acid molecule encoding a polypeptide of the invention can be cloned into such an expression vector such that the fusion moiety is linked in-frame to the polypeptide.

[0109] The isolated polypeptide can be purified from cells that naturally express it, purified from cells that have been altered to express it (recombinant), or synthesized using known protein synthesis methods. In one embodiment, the polypeptide is produced by recombinant DNA techniques. For example, a nucleic acid molecule encoding the polypeptide is cloned into an expression vector, the expression vector introduced into a host cell and the polypeptide expressed in the host cell. The polypeptide can then be isolated from the cells by an appropriate purification scheme using standard protein purification techniques.

[0110] In general, polypeptides of the present invention can be used as a molecular weight marker on SDS-PAGE gels or on molecular sieve gel filtration columns using art-recognized methods. The polypeptides of the present invention can be used to raise antibodies or to elicit an immune response. The polypeptides can also be used as a reagent, e.g., a labeled reagent, in assays to quantitatively determine levels of the polypeptide or a molecule to which it binds (e.g., a receptor or a ligand) in biological fluids. The polypeptides can also be used as markers for cells or tissues in which the corresponding polypeptide is preferentially expressed, either constitutively, during tissue differentiation, or in a diseased state. The polypeptides can be used to isolate a corresponding binding agent, e.g., receptor or ligand, such as, for example, in an interaction trap assay, and to screen for peptide or small molecule antagonists or agonists of the binding interaction.

Antibodies of the Invention

[0111] Polyclonal and/or monoclonal antibodies that specifically bind one form of the gene product but not to the other form of the gene product are also provided. Antibodies are also provided that bind a portion of either the variant or the reference gene product that contains the polymorphic site or sites. The invention provides antibodies to the polypeptides and polypeptide fragments of the invention, e.g., having an amino acid sequence encoded by SEQ ID NO: 2, 3, 4, 5, 6, 7, 8, 9, 10, 12 or 14, or a portion thereof, or having an amino acid sequence encoded by a nucleic acid molecule comprising all or a portion of SEQ ID NO: 1 which may optionally comprise at least one polymorphism shown in Tables 11 and 12 (e.g., SEQ ID NO: 2, 3, 4, 5, 6, 7, 8, 9, 10, 12 or 14, or another splicing variant or portion thereof). The term “antibody” as used herein refers to immunoglobulin molecules and immunologically active portions of immunoglobulin molecules, i.e., molecules that contain an antigen binding site that specifically binds an antigen. A molecule that specifically binds to a polypeptide of the invention is a molecule that binds to that polypeptide or a fragment thereof, but does not substantially bind other molecules in a sample, e.g., a biological sample, which naturally contains the polypeptide. Examples of immunologically active portions of immunoglobulin molecules include F(ab) and F(ab′)₂ fragments which can be generated by treating the antibody with an enzyme such as pepsin. The invention provides polyclonal and monoclonal antibodies that bind to a polypeptide of the invention. The term “monoclonal antibody” or “monoclonal antibody composition”, as used herein, refers to a population of antibody molecules that contain only one species of an antigen binding site capable of immunoreacting with a particular epitope of a polypeptide of the invention. A monoclonal antibody composition thus typically displays a single binding affinity for a particular polypeptide of the invention with which it immunoreacts.

[0112] Polyclonal antibodies can be prepared as described above by immunizing a suitable subject with a desired immunogen, e.g., polypeptide of the invention or fragment thereof. The antibody titer in the immunized subject can be monitored over time by standard techniques, such as with an enzyme linked immunosorbent assay (ELISA) using immobilized polypeptide. If desired, the antibody molecules directed against the polypeptide can be isolated from the mammal (e.g., from the blood) and further purified by well-known techniques, such as protein A chromatography to obtain the IgG fraction. At an appropriate time after immunization, e.g., when the antibody titers are highest, antibody-producing cells can be obtained from the subject and used to prepare monoclonal antibodies by standard techniques, such as the hybridoma technique originally described by Kohler and Milstein (1975) Nature, 256:495-497, the human B cell hybridoma technique (Kozbor et al. (1983) Immunol. Today, 4:72), the EBV-hybridoma technique (Cole et al. (1985), Monoclonal Antibodies and Cancer Therapy, Alan R. Liss, Inc., pp. 77-96) or trioma techniques. The technology for producing hybridomas is well known (see generally Current Protocols in Immunology (1994) Coligan et al. (eds.) John Wiley & Sons, Inc., New York, N.Y.). Briefly, an immortal cell line (typically a myeloma) is fused to lymphocytes (typically splenocytes) from a mammal immunized with an immunogen as described above, and the culture supernatants of the resulting hybridoma cells are screened to identify a hybridoma producing a monoclonal antibody that binds a polypeptide of the invention.

[0113] Any of the many well known protocols used for fusing lymphocytes and immortalized cell lines can be applied for the purpose of generating a monoclonal antibody to a polypeptide of the invention (see, e.g., Current Protocols in Immunology, supra; Galfre et al. (1977) Nature, 266:55052; R. H. Kenneth, in Monoclonal Antibodies: A New Dimension In Biological Analyses, Plenum Publishing Corp., New York, N.Y. (1980); and Lerner (1981) Yale J. Biol. Med., 54:387-402. Moreover, the ordinarily skilled worker will appreciate that there are many variations of such methods that also would be useful.

[0114] Alternative to preparing monoclonal antibody-secreting hybridomas, a monoclonal antibody to a polypeptide of the invention can be identified and isolated by screening a recombinant combinatorial immunoglobulin library (e.g., an antibody phage display library) with the polypeptide to thereby isolate immunoglobulin library members that bind the polypeptide. Kits for generating and screening phage display libraries are commercially available (e.g., the Pharmacia Recombinant Phage Antibody System, Catalog No. 27-9400-01; and the Stratagene SurfZAP™ Phage Display Kit, Catalog No. 240612). Additionally, examples of methods and reagents particularly amenable for use in generating and screening antibody display library can be found in, for example, U.S. Pat. No. 5,223,409; PCT Publication No. WO 92/18619; PCT Publication No. WO 91/17271; PCT Publication No. WO 92/20791; PCT Publication No. WO 92/15679; PCT Publication No. WO 93/01288; PCT Publication No. WO 92/01047; PCT Publication No. WO 92/09690; PCT Publication No. WO 90/02809; Fuchs et al. (1991) Bio/Technology, 9:1370-1372; Hay et al. (1992) Hum. Antibod. Hybridomas, 3:81-85; Huse et al. (1989) Science, 246:1275-1281; Griffiths et al. (1993) EMBO J., 12:725-734.

[0115] Additionally, recombinant antibodies, such as chimeric and humanized monoclonal antibodies, comprising both human and non-human portions, which can be made using standard recombinant DNA techniques, are within the scope of the invention. Such chimeric and humanized monoclonal antibodies can be produced by recombinant DNA techniques known in the art.

[0116] In general, antibodies of the invention (e.g., a monoclonal antibody) can be used to isolate a polypeptide of the invention by standard techniques, such as affinity chromatography or immunoprecipitation. A polypeptide-specific antibody can facilitate the purification of natural polypeptide from cells and of recombinantly produced polypeptide expressed in host cells. Moreover, an antibody specific for a polypeptide of the invention can be used to detect the polypeptide (e.g., in a cellular lysate, cell supernatant, or tissue sample) in order to evaluate the abundance and pattern of expression of the polypeptide. Antibodies can be used diagnostically to monitor protein levels in tissue as part of a clinical testing procedure, e.g., to, for example, determine the efficacy of a given treatment regimen. Coupling the antibody to a detectable substance can facilitate detection. Examples of detectable substances include various enzymes, prosthetic groups, fluorescent materials, luminescent materials, bioluminescent materials, and radioactive materials. Examples of suitable enzymes include horseradish peroxidase, alkaline phosphatase, β-galactosidase, or acetylcholinesterase; examples of suitable prosthetic group complexes include streptavidin/biotin and avidin/biotin; examples of suitable fluorescent materials include umbelliferone, fluorescein, fluorescein isothiocyanate, rhodamine, dichlorotriazinylamine fluorescein, dansyl chloride or phycoerythrin; an example of a luminescent material includes luminol; examples of bioluminescent materials include luciferase, luciferin, and aequorin, and examples of suitable radioactive material include 125I, 131I, 35S or 3H.

Diagnostic Assays

[0117] The nucleic acids, probes, primers, polypeptides and antibodies described herein can be used in methods of diagnosis of stroke or diagnosis of a susceptibility to stroke or to a disease or condition associated with an stroke gene, such as PDE4D, as well as in kits useful for diagnosis of stroke or a susceptibility to stroke or to a disease or condition associated with PDE4D. In one embodiment, the kit useful for diagnosis of stroke or susceptibility to stroke, or to a disease or condition associated with PDE4D comprises primers as described herein, wherein the primers contain one or more of the SNPs identified herein. In parallel, definition of stroke risk associated with PDE4D/cAMP pathway is useful and novel to define subgroups of individuals who would be best treated by pharmaceutical agents acting on PDE4D and/cAMP pathways (and vice versa).

[0118] In one embodiment of the invention, diagnosis of stroke or susceptibility to stroke (or diagnosis of or susceptibility to a disease or condition associated with PDE4D) is made by detecting a polymorphism in a PDE4D nucleic acid as described herein. The polymorphism can be an alteration in a PDE4D nucleic acid, such as the insertion or deletion of a single nucleotide, or of more than one nucleotide, resulting in a frame shift alteration; the change of at least one nucleotide, resulting in a change in the encoded amino acid; the change of at least one nucleotide, resulting in the generation of a premature stop codon; the deletion of several nucleotides, resulting in a deletion of one or more amino acids encoded by the nucleotides; the insertion of one or several nucleotides, such as by unequal recombination or gene conversion, resulting in an interruption of the coding sequence of the gene or nucleic acid; duplication of all or a part of the gene or nucleic acid; transposition of all or a part of the gene or nucleic acid; or rearrangement of all or a part of the gene or nucleic acid. More than one such alteration may be present in a single gene or nucleic acid. Such sequence changes cause an alteration in the polypeptide encoded by a PDE4D nucleic acid. For example, if the alteration is a frame shift alteration, the frame shift can result in a change in the encoded amino acids, and/or can result in the generation of a premature stop codon, causing generation of a truncated polypeptide. Alternatively, a polymorphism associated with a disease or condition associated with a PDE4D nucleic acid or a susceptibility to a disease or condition associated with a PDE4D nucleic acid can be a synonymous alteration in one or more nucleotides (i.e., an alteration that does not result in a change in the polypeptide encoded by a PDE4D nucleic acid). For diagnostic applications, there may be polymorphisms informative for prediction of disease risk that are in linkage disequilibrium with the functional polymorphism. Such a polymorphism may alter splicing sites, affect the stability or transport of mRNA, or otherwise affect the transcription or translation of the nucleic acid. A PDE4D nucleic acid that has any of the alteration described above is referred to herein as an “altered nucleic acid.”

[0119] In a first method of diagnosing stroke or a susceptibility to stroke, hybridization methods, such as Southern analysis, Northern analysis, or in situ hybridizations, can be used (see Current Protocols in Molecular Biology, Ausubel, F. et al., eds., John Wiley & Sons, including all supplements through 1999). For example, a biological sample from a test subject (a “test sample”) of genomic DNA, RNA, or cDNA, is obtained from an individual suspected of having, being susceptible to or predisposed for, or carrying a defect for, a susceptibility to a disease or condition associated with a PDE4D nucleic acid (the “test individual”). The individual can be an adult, child, or fetus. The test sample can be from any source which contains genomic DNA, such as a blood sample, sample of amniotic fluid, sample of cerebrospinal fluid, or tissue sample from skin, muscle, buccal or conjunctival mucosa, placenta, gastrointestinal tract or other organs. A test sample of DNA from fetal cells or tissue can be obtained by appropriate methods, such as by amniocentesis or chorionic villus sampling. The DNA, RNA, or cDNA sample is then examined to determine whether a polymorphism in a stroke nucleic acid is present, and/or to determine which splicing variant(s) encoded by the PDE4D is present. The presence of the polymorphism or splicing variant(s) can be indicated by hybridization of the nucleic acid in the genomic DNA, RNA, or cDNA to a nucleic acid probe. A “nucleic acid probe,” as used herein, can be a DNA probe or an RNA probe; the nucleic acid probe can contain at least one polymorphism in a PDE4D nucleic acid or contains a nucleic acid encoding a particular splicing variant of a PDE4D nucleic acid. The probe can be any of the nucleic acid molecules described above (e.g., the nucleic acid, a fragment, a vector comprising the nucleic acid, a probe or primer, etc.).

[0120] To diagnose a susceptibility to stroke, a hybridization sample is formed by contacting the test sample containing PDE4D, with at least one nucleic acid probe. A preferred probe for detecting mRNA or genomic DNA is a labeled nucleic acid probe capable of hybridizing to mRNA or genomic DNA sequences described herein. The nucleic acid probe can be, for example, a full-length nucleic acid molecule, or a portion thereof, such as an oligonucleotide of at least 15, 30, 50, 100, 250 or 500 nucleotides in length and sufficient to specifically hybridize under stringent conditions to appropriate mRNA or genomic DNA. For example, the nucleic acid probe can be all or a portion of SEQ ID NO: 1 which may optionally comprise at least one polymorphism shown in Tables 11 and 12, or the complement thereof, or a portion thereof; or can be a nucleic acid encoding a portion of SEQ ID NO: 2, 3, 4, 5, 6, 7, 8, 9, 10, 12 or 14. Other suitable probes for use in the diagnostic assays of the invention are described above (see e.g., probes and primers discussed under the heading, “Nucleic Acids of the Invention”).

[0121] The hybridization sample is maintained under conditions that are sufficient to allow specific hybridization of the nucleic acid probe to PDE4D. “Specific hybridization”, as used herein, indicates exact hybridization (e.g., with no mismatches). Specific hybridization can be performed under high stringency conditions or moderate stringency conditions, for example, as described above. In a particularly preferred embodiment, the hybridization conditions for specific hybridization are high stringency.

[0122] Specific hybridization, if present, is then detected using standard methods. If specific hybridization occurs between the nucleic acid probe and PDE4D in the test sample, then PDE4D has the polymorphism, or is the splicing variant, that is present in the nucleic acid probe. More than one nucleic acid probe can also be used concurrently in this method. In one embodiment, specific hybridization of at least one of the nucleic acid probes is indicative of a polymorphism in PDE4D, or of the presence of a particular splicing variant encoding PDE4D and is therefore diagnostic for a susceptibility to stroke.

[0123] In Northern analysis (see Current Protocols in Molecular Biology, Ausubel, F. et al., eds., John Wiley & Sons, supra) the hybridization methods described above are used to identify the presence of a polymorphism or a particular splicing variant, associated with a susceptibility to stroke. For Northern analysis, a test sample of RNA is obtained from the individual by appropriate means. Specific hybridization of a nucleic acid probe, as described above, to RNA from the individual is indicative of a polymorphism in PDE4D, or of the presence of a particular splicing variant encoded by PDE4D, and is therefore diagnostic for a susceptibility to stroke.

[0124] For representative examples of use of nucleic acid probes, see, for example, U.S. Pat. Nos. 5,288,611 and 4,851,330.

[0125] Alternatively, a peptide nucleic acid (PNA) probe can be used instead of a nucleic acid probe in the hybridization methods described above. PNA is a DNA mimic having a peptide-like, inorganic backbone, such as N-(2-aminoethyl)glycine units, with an organic base (A, G, C, T or U) attached to the glycine nitrogen via a methylene carbonyl linker (see, for example, Nielsen, P. E. et al., Bioconjugate Chemistry, 1994, 5, American Chemical Society, p. 1 (1994). The PNA probe can be designed to specifically hybridize to a gene having a polymorphism associated with a susceptibility to stroke. Hybridization of the PNA probe to PDE4D is diagnostic for a susceptibility to stroke.

[0126] In another method of the invention, mutation analysis by restriction digestion can be used to detect a mutant gene, or genes containing a polymorphism(s), if the mutation or polymorphism in the gene results in the creation or elimination of a restriction site. If a restriction site is not naturally created, one can be created by PCR that depends on the polymorphism and allows genotyping. A test sample containing genomic DNA is obtained from the individual. Nucleic acid amplification methods, including but not limited to Polymerase chain reaction (PCR), Transcription Mediated Amplifications (TMA), and Ligase Mediate Amplification (LMA), can be used to amplify PDE4D. The digestion pattern of the relevant DNA fragment indicates the presence or absence of the mutation or polymorphism in PDE4D, and therefore indicates the presence or absence of this susceptibility to stroke. RFLP analysis is conducted as described (see Current Protocols in Molecular Biology, supra). Amplification techniques based upon detection of sequence of interest using reverse dot blot technology (linear array or strips) can be used and are described, for example, in U.S. Pat. No. 5,468,613.

[0127] Sequence analysis can also be used to detect specific polymorphisms in PDE4D. A test sample of DNA or RNA is obtained from the test individual. PCR or other appropriate methods can be used to amplify the gene, and/or its flanking sequences, if desired. The sequence of PDE4D, or a fragment of the gene, or cDNA, or fragment of the cDNA, or mRNA, or fragment of the mRNA, is determined, using standard methods. The sequence of the gene, gene fragment, cDNA, cDNA fragment, mRNA, or mRNA fragment is compared with the known nucleic acid sequence of the gene, cDNA (e.g., SEQ ID NO: 1 which may optionally comprise at least one polymorphism shown in Tables 11 and 12, or a nucleic acid sequence encoding SEQ ID NO: 2, 3, 4, 5, 6, 7, 8, 9, 10, 12 or 14, or a fragment thereof) or mRNA, as appropriate. In one embodiment, the presence of at least one of the polymorphisms in PDE4D indicates that the individual has a susceptibility to stroke.

[0128] Allele-specific oligonucleotides can also be used to detect the presence of a polymorphism in PDE4D, through the use of dot-blot hybridization of amplified oligonucleotides with allele-specific oligonucleotide (ASO) probes (see, for example, Saiki, R. et al., (1986), Nature (London) 324:163-166). An “allele-specific oligonucleotide” (also referred to herein as an “allele-specific oligonucleotide probe”) is an oligonucleotide of approximately 10-50 base pairs, preferably approximately 15-30 base pairs, that specifically hybridizes to PDE4D, and that contains a polymorphism associated with a susceptibility to stroke. An allele-specific oligonucleotide probe that is specific for particular polymorphisms in PDE4D can be prepared, using standard methods (see Current Protocols in Molecular Biology, supra). To identify polymorphisms in the gene that are associated with a susceptibility to stroke, a test sample of DNA is obtained from the individual. PCR can be used to amplify all or a fragment of PDE4D, and its flanking sequences. The DNA containing the amplified PDE4D (or fragment of the gene) is dot-blotted, using standard methods (see Current Protocols in Molecular Biology, supra), and the blot is contacted with the oligonucleotide probe. The presence of specific hybridization of the probe to the amplified PDE4D is then detected. Specific hybridization of an allele-specific oligonucleotide probe to DNA from the individual is indicative of a polymorphism in PDE4D, and is therefore indicative of a susceptibility to stroke.

[0129] The invention further provides allele-specific oligonucleotides that hybridize to the reference or variant allele of a nucleic acid comprising a single nucleotide polymorphism or to the complement thereof. These oligonucleotides can be probes or primers.

[0130] An allele-specific primer hybridizes to a site on target DNA overlapping a polymorphism and only primes amplification of an allelic form to which the primer exhibits perfect complementarity. See Gibbs, Nucleic Acid Res. 17, 2427-2448 (1989). This primer is used in conjunction with a second primer that hybridizes at a distal site. Amplification proceeds from the two primers, resulting in a detectable product that indicates the particular allelic form is present. A control is usually performed with a second pair of primers, one of which shows a single base mismatch at the polymorphic site and the other of which exhibits perfect complementarity to a distal site. The single-base mismatch prevents amplification and no detectable product is formed. The method works best when the mismatch is included in the 3′-most position of the oligonucleotide aligned with the polymorphism because this position is most destabilizing to elongation from the primer (see, e.g., WO 93/22456).

[0131] With the addition of such analogs as locked nucleic acids (LNAs), the size of primers and probes can be reduced to as few as 8 bases. LNAs are a novel class of bicyclic DNA analogs in which the 2′ and 4′ positions in the furanose ring are joined via an O-methylene (oxy-LNA), S-methylene (thio-LNA), or amino methylene (amino-LNA) moiety. Common to all of these LNA variants is an affinity toward complementary nucleic acids, which is by far the highest reported for a DNA analog. For example, particular all oxy-LNA nonamers have been shown to have melting temperatures of 64° C. and 74° C. when in complex with complementary DNA or RNA, respectively, as opposed to 28° C. for both DNA and RNA for the corresponding DNA nonamer. Substantial increases in Tₘ are also obtained when LNA monomers are used in combination with standard DNA or RNA monomers. For primers and probes, depending on where the LNA monomers are included (e.g., the 3′ end, the 5′end, or in the middle), the Tₘ could be increased considerably.

[0132] In another embodiment, arrays of oligonucleotide probes that are complementary to target nucleic acid sequence segments from an individual, can be used to identify polymorphisms in PDE4D. For example, in one embodiment, an oligonucleotide linear array can be used. Oligonucleotide arrays typically comprise a plurality of different oligonucleotide probes that are coupled to a surface of a substrate in different known locations. These oligonucleotide arrays, also described as “Genechips.™.,” have been generally described in the art, for example, U.S. Pat. No. 5,143,854 and PCT patent publication Nos. WO 90/15070 and 92/10092. These arrays can generally be produced using mechanical synthesis methods or light directed synthesis methods that incorporate a combination of photolithographic methods and solid phase oligonucleotide synthesis methods. See Fodor et al., Science, 251:767-777 (1991), Pirrung et al., U.S. Pat. No. 5,143,854 (see also PCT Application No. WO 90/15070) and Fodor et al., PCT Publication No. WO 92/10092 and U.S. Pat. No. 5,424,186, the entire teachings of each of which are incorporated by reference herein. Techniques for the synthesis of these arrays using mechanical synthesis methods are described in, e.g., U.S. Pat. No. 5,384,261, the entire teachings of which are incorporated by reference herein. In another embodiment, linear arrays or microarrays can be utilized.

[0133] Once an oligonucleotide array is prepared, a nucleic acid of interest is hybridized with the array and scanned for polymorphisms. Hybridization and scanning are generally carried out by methods described herein and also in, e.g., Published PCT Application Nos. WO 92/10092 and WO 95/11995, and U.S. Pat. No. 5,424,186, the entire teachings of which are incorporated by reference herein. In brief, a target nucleic acid sequence that includes one or more previously identified polymorphic markers is amplified by well-known amplification techniques, e.g., PCR. Typically, this involves the use of primer sequences that are complementary to the two strands of the target sequence both upstream and downstream from the polymorphism. Asymmetric PCR techniques may also be used. Amplified target, generally incorporating a label, is then hybridized with the array under appropriate conditions. Upon completion of hybridization and washing of the array, the array is scanned to determine the position on the array to which the target sequence hybridizes. The hybridization data obtained from the scan is typically in the form of fluorescence intensities as a function of location on the array.

[0134] Although primarily described in terms of a single detection block, e.g., for detection of a single polymorphism, arrays can include multiple detection blocks, and thus be capable of analyzing multiple, specific polymorphisms. In alternate arrangements, it will generally be understood that detection blocks may be grouped within a single array or in multiple, separate arrays so that varying, optimal conditions may be used during the hybridization of the target to the array. For example, it may often be desirable to provide for the detection of those polymorphisms that fall within G-C rich stretches of a genomic sequence, separately from those falling in A-T rich segments. This allows for the separate optimization of hybridization conditions for each situation.

[0135] Additional description of use of oligonucleotide arrays for detection of polymorphisms can be found, for example, in U.S. Pat. Nos. 5,858,659 and 5,837,832, the entire teachings of which are incorporated by reference herein.

[0136] Other methods of nucleic acid analysis can be used to detect polymorphisms in PDE4D or splicing variants encoding by PDE4D. Representative methods include direct manual sequencing (Church and Gilbert, (1988), Proc. Natl. Acad. Sci. USA 81:1991-1995; Sanger, F. et al. (1977) Proc. Natl. Acad. Sci. 74:5463-5467; Beavis et al., U.S. Pat. No. 5,288,644); automated fluorescent sequencing; single-stranded conformation polymorphism assays (SSCP); clamped denaturing gel electrophoresis (CDGE); denaturing gradient gel electrophoresis (DGGE) (Sheffield, V. C. et al. (19891) Proc. Natl. Acad. Sci. USA 86:232-236), mobility shift analysis (Orita, M. et al. (1989) Proc. Natl. Acad. Sci. USA 86:2766-2770), restriction enzyme analysis (Flavell et al. (1978) Cell 15:25; Geever, et al. (1981) Proc. Natl. Acad. Sci. USA 78:5081); heteroduplex analysis; chemical mismatch cleavage (CMC) (Cotton et al. (1985) Proc. Natl. Acad. Sci. USA 85:4397-4401); RNase protection assays (Myers, R. M. et al. (1985) Science 230:1242); use of polypeptides which recognize nucleotide mismatches, such as E. coli mutS protein, for example.

[0137] In one embodiment of the invention, diagnosis of a disease or condition associated with PDE4D (e.g., stroke) or a susceptibility to a disease or condition associated with PDE4D (e.g., stroke) can also be made by expression analysis by quantitative PCR (kinetic thermal cycling). This technique utilizing TaqMan® or Lightcycler® can be used to allow the identification of polymorphisms and whether a patient is homozygous or heterozygous. The technique can assess the presence of an alteration in the expression or composition of the polypeptide encoded by a PDE4D nucleic acid or splicing variants encoded by a PDE4D nucleic acid. Further, the expression of the variants can be quantified as physically or functionally different.

[0138] In another embodiment of the invention, diagnosis of a susceptibility to stroke can also be made by examining expression and/or composition of an PDE4D polypeptide, by a variety of methods, including enzyme linked immunosorbent assays (ELISAs), Western blots, immunoprecipitations and immunofluorescence. A test sample from an individual is assessed for the presence of an alteration in the expression and/or an alteration in composition of the polypeptide encoded by PDE4D, or for the presence of a particular variant (e.g., an isoform) encoded by PDE4D. An alteration in expression of a polypeptide encoded by PDE4D can be, for example, an alteration in the quantitative polypeptide expression (i.e., the amount of polypeptide produced); an alteration in the composition of a polypeptide encoded by PDE4D is an alteration in the qualitative polypeptide expression (e.g., expression of a mutant PDE4D polypeptide or of a different splicing variant or isoform). In one embodiment, detecting a particular splicing variant encoded by that PDE4D, or a particular pattern of splicing variants makes diagnosis of the disease or condition associated with PDE4D or a susceptibility to a disease or condition associated with PDE4D.

[0139] Both such alterations (quantitative and qualitative) can also be present. An “alteration” in the polypeptide expression or composition, as used herein, refers to an alteration in expression or composition in a test sample, as compared with the expression or composition of polypeptide by PDE4D in a control sample. A control sample is a sample that corresponds to the test sample (e.g., is from the same type of cells), and is from an individual who is not affected by stroke. An alteration in the expression or composition of the polypeptide in the test sample, as compared with the control sample, is indicative of a susceptibility to stroke. Similarly, the presence of one or more different splicing variants or isoforms in the test sample, or the presence of significantly different amounts of different splicing variants in the test sample, as compared with the control sample, is indicative of a susceptibility to stroke. Various means of examining expression or composition of the polypeptide encoded by PDE4D can be used, including spectroscopy, colorimetry, electrophoresis, isoelectric focusing, and immunoassays (e.g., David et al., U.S. Pat. No. 4,376,110) such as immunoblotting (see also Current Protocols in Molecular Biology, particularly chapter 10). For example, in one embodiment, an antibody capable of binding to the polypeptide (e.g., as described above), preferably an antibody with a detectable label, can be used. Antibodies can be polyclonal, or more preferably, monoclonal. An intact antibody, or a fragment thereof (e.g., Fab or F(ab′)₂) can be used. The term “labeled”, with regard to the probe or antibody, is intended to encompass direct labeling of the probe or antibody by coupling (i.e., physically linking) a detectable substance to the probe or antibody, as well as indirect labeling of the probe or antibody by reactivity with another reagent that is directly labeled. Examples of indirect labeling include detection of a primary antibody using a fluorescently labeled secondary antibody and end-labeling of a DNA probe with biotin such that it can be detected with fluorescently labeled streptavidin.

[0140] Western blotting analysis, using an antibody as described above that specifically binds to a polypeptide encoded by a mutant PDE4D, or an antibody that specifically binds to a polypeptide encoded by a non-mutant gene, or an antibody that specifically binds to a particular splicing variant encoded by PDE4D, can be used to identify the presence in a test sample of a particular splicing variant or isoform, or of a polypeptide encoded by a polymorphic or mutant PDE4D, or the absence in a test sample of a particular splicing variant or isoform, or of a polypeptide encoded by a non-polymorphic or non-mutant gene. The presence of a polypeptide encoded by a polymorphic or mutant gene, or the absence of a polypeptide encoded by a non-polymorphic or non-mutant gene, is diagnostic for a susceptibility to stroke, as is the presence (or absence) of particular splicing variants encoded by the PDE4D gene.

[0141] In one embodiment of this method, the level or amount of polypeptide encoded by PDE4D in a test sample is compared with the level or amount of the polypeptide encoded by PDE4D in a control sample. A level or amount of the polypeptide in the test sample that is higher or lower than the level or amount of the polypeptide in the control sample, such that the difference is statistically significant, is indicative of an alteration in the expression of the polypeptide encoded by PDE4D, and is diagnostic for a susceptibility to stroke. Alternatively, the composition of the polypeptide encoded by PDE4D in a test sample is compared with the composition of the polypeptide encoded by PDE4D in a control sample (e.g., the presence of different splicing variants). A difference in the composition of the polypeptide in the test sample, as compared with the composition of the polypeptide in the control sample, is diagnostic for a susceptibility to stroke. In another embodiment, both the level or amount and the composition of the polypeptide can be assessed in the test sample and in the control sample. A difference in the amount or level of the polypeptide in the test sample, compared to the control sample; a difference in composition in the test sample, compared to the control sample; or both a difference in the amount or level, and a difference in the composition, is indicative of a susceptibility to stroke.

[0142] In another embodiment, assessment of the splicing variant or isoform(s) of a polypeptide encoded by a polymorphic or mutant PDE4D, can be performed. The assessment can be performed directly (e.g., by examining the polypeptide itself), or indirectly (e.g., by examining the mRNA encoding the polypeptide, such as through mRNA profiling). For example, probes or primers as described herein can be used to determine which splicing variants or isoforms are encoded by PDE4D mRNA, using standard methods.

[0143] The presence in a test sample of a particular splicing variant(s) or isoform(s) associated with stroke or risk of stroke, or the absence in a test sample of a particular splicing variant(s) or isoform(s) not associated with stroke or risk of stroke, is diagnostic for a disease or condition associated with a PDE4D gene or a susceptibility to a disease condition associated with a PDE4D gene. Similarly, the absence in a test sample of a particular splicing variant(s) or isoform(s) associated with stroke or risk of stroke, or the presence in a test sample of a particular splicing variant(s) or isoform(s) not associated with stroke or risk of stroke, is diagnostic for the absence of disease or condition associated with a PDE4D gene or a susceptibility to a disease or condition associated with a PDE4D gene.

[0144] In another embodiment, differential expression of isoforms PDE4D7, PDE4D9 and combinations thereof can be assessed and compared to control individuals. Decreased expression of these isoforms is indicative of susceptibility to stroke, particularly carotid stroke and/or cardiogenic stroke.

[0145] The invention further pertains to a method for the diagnosis and identification of susceptibility to stroke in an individual, by identifying an at-risk haplotype in PDE4D. In one embodiment, the at-risk haplotype is a haplotype for which the presence of the haplotype increases the risk of stroke significantly. Although it is to be understood that identifying whether a risk is significant may depend on a variety of factors, including the specific disease, the haplotype, and often, environmental factors, the significance may be measured by an odds ratio or a percentage. In a further embodiment, the significance is measured by a percentage. In one embodiment, a significant risk is measured as an odds ratio of at least about 1.2, including but not limited to: 1.2, 1.3, 1.4, 1.5, 1.6, 1.7, 1.8 and 1.9. In a further embodiment, an odds ratio of at least 1.2 is significant. In a further embodiment, an odds ratio of at least about 1.5 is significant. In a further embodiment, a significant increase in risk is at least about 1.7 is significant. In a further embodiment, a significant increase in risk is at least about 20%, including but not limited to about 25%, 30%, 35%, 40%, 45%, 50%, 55%, 60%, 65%, 70%, 75%, 80%, 85%, 90%, 95% and 98%. In a further embodiment, a significant increase in risk is at least about 50%. It is understood however, that identifying whether a risk is medically significant may also depend on a variety of factors, including the specific disease, the haplotype, and often, environmental factors.

[0146] The invention also pertains to methods of diagnosing stroke or a susceptibility to stroke in an individual, comprising screening for an at-risk haplotype in the PDE4D nucleic acid that is more frequently present in an individual susceptible to stroke (affected), compared to the frequency of its presence in a healthy individual (control), wherein the presence of the haplotype is indicative of stroke or susceptibility to stroke. Standard techniques for genotyping for the presence of SNPs and/or microsatellite markers that are associated with stroke can be used, such as fluorescent-based techniques (Chen, et al., Genome Res. 9, 492 (1999), PCR, LCR, Nested PCR and other techniques for nucleic acid amplification. In one embodiment, the method comprises assessing in an individual the presence or frequency of SNPs and/or microsatellites in the PDE4D nucleic acid that are associated with stroke, wherein an excess or higher frequency of the SNPs and/or microsatellites compared to a healthy control individual is indicative that the individual has stroke or is susceptible to stroke.

[0147] See Table 2C, Table 3, Table 4A, and 4B for SNPs and markers that comprise haplotypes that can be used as screening tools. See also, Table 5, Table 6, Table 11 and Table 12 that set forth previously known SNP and novel microsatellite markers and their counterpart sequence ID reference numbers. SNPs and markers from these lists represent at-risk haplotypes and can be used to design diagnostic tests for determining a susceptibility to stroke.

[0148] Kits (e.g., reagent kits) useful in the methods of diagnosis comprise components useful in any of the methods described herein, including for example, hybridization probes or primers as described herein (e.g., labeled probes or primers), reagents for detection of labeled molecules, restriction enzymes (e.g., for RFLP analysis), allele-specific oligonucleotides, antibodies which bind to altered or to non-altered (native) PDE4D polypeptide, means for amplification of nucleic acids comprising PDE4D, or means for analyzing the nucleic acid sequence of PDE4D or for analyzing the amino acid sequence of an PDE4D polypeptide, etc. In one embodiment, a kit for diagnosing susceptibility to stroke can comprise primers for nucleic acid amplification of a region in the PDE4D gene comprising an at-risk haplotype that is more frequently present in an individual susceptible to stroke. The primers can be designed using portions of the nucleic acids flanking SNPs that are indicative of stroke. In a particularly preferred embodiment, the primers are designed to amplify regions of the PDE4D gene associated with an at-risk haplotype for stroke, shown in Tables 8A and 8B. In another embodiment of the invention, a kit for diagnosing susceptibility to stroke can further comprise probes designed to hybridize to regions of the PDE4D gene associated with an at-risk haplotype for stroke, shown in Table 5 and table 6 and/or generated from SEQ ID Nos: 85-102.

Screening Assays and Agents Identified Thereby

[0149] The invention provides methods (also referred to herein as “screening assays”) for identifying the presence of a nucleotide that hybridizes to a nucleic acid of the invention, as well as for identifying the presence of a polypeptide encoded by a nucleic acid of the invention. In one embodiment, the presence (or absence) of a nucleic acid molecule of interest (e.g., a nucleic acid that has significant homology with a nucleic acid of the invention) in a sample can be assessed by contacting the sample with a nucleic acid comprising a nucleic acid of the invention (e.g., a nucleic acid having the sequence of SEQ ID NO: 1 which may optionally comprise at least one polymorphism shown in Tables 11 and 12, or the complement thereof, or a nucleic acid encoding an amino acid having the sequence of SEQ ID NO: 2, 3, 4, 5, 6, 7, 8, 9, 10, 12 or 14, or a fragment or variant of such nucleic acids), under stringent conditions as described above, and then assessing the sample for the presence (or absence) of hybridization. In another embodiment, high stringency conditions are conditions appropriate for selective hybridization. In another embodiment, a sample containing the nucleic acid molecule of interest is contacted with a nucleic acid containing a contiguous nucleotide sequence (e.g., a primer or a probe as described above) that is at least partially complementary to a part of the nucleic acid molecule of interest (e.g., a PDE4D nucleic acid), and the contacted sample is assessed for the presence or absence of hybridization. In another embodiment, the nucleic acid containing a contiguous nucleotide sequence is completely complementary to a part of the nucleic acid molecule of interest.

[0150] In any of these embodiments, all or a portion of the nucleic acid of interest can be subjected to amplification prior to performing the hybridization.

[0151] In another embodiment, the presence (or absence) of a polypeptide of interest, such as a polypeptide of the invention or a fragment or variant thereof, in a sample can be assessed by contacting the sample with an antibody that specifically hybridizes to the polypeptide of interest (e.g., an antibody such as those described above), and then assessing the sample for the presence (or absence) of binding of the antibody to the polypeptide of interest.

[0152] In another embodiment, the invention provides methods for identifying agents (e.g., fusion proteins, polypeptides, peptidomimetics, prodrugs, receptors, binding agents, antibodies, small molecules or other drugs, or ribozymes) that alter (e.g., increase or decrease) the activity of the polypeptides described herein, or which otherwise interact with the polypeptides herein. For example, such agents can be agents which bind to polypeptides described herein (e.g., PDE4D binding agents); which have a stimulatory or inhibitory effect on, for example, activity of polypeptides of the invention; or which change (e.g., enhance or inhibit) the ability of the polypeptides of the invention to interact with PDE4D binding agents (e.g., receptors or other binding agents); or which alter posttranslational processing of the PDE4D polypeptide (e.g., agents that alter proteolytic processing to direct the polypeptide from where it is normally synthesized to another location in the cell, such as the cell surface); agents that alter proteolytic processing such that more polypeptide is released from the cell, etc.

[0153] In one embodiment, the invention provides assays for screening candidate or test agents that bind to or modulate the activity of polypeptides described herein (or biologically active portion(s) thereof), as well as agents identifiable by the assays. Test agents can be obtained using any of the numerous approaches in combinatorial library methods known in the art, including: biological libraries; spatially addressable parallel solid phase or solution phase libraries; synthetic library methods requiring deconvolution; the ‘one-bead one-compound’ library method; and synthetic library methods using affinity chromatography selection. The biological library approach is limited to polypeptide libraries, while the other four approaches are applicable to polypeptide, non-peptide oligomer or small molecule libraries of compounds (Lam, K. S. (1997) Anticancer Drug Des., 12:145).

[0154] In one embodiment, to identify agents which alter the activity of a PDE4D polypeptide, a cell, cell lysate, or solution containing or expressing a PDE4D polypeptide (e.g., SEQ ID NO: 2, 3, 4, 5, 6, 7, 8, 9, 10, 12 or 14, or another splicing variant encoded by PDE4D), or a fragment or derivative thereof (as described above), can be contacted with an agent to be tested; alternatively, the polypeptide can be contacted directly with the agent to be tested. The level (amount) of PDE4D activity is assessed (e.g., the level (amount) of PDE4D activity is measured, either directly or indirectly), and is compared with the level of activity in a control (i.e., the level of activity of the PDE4D polypeptide or active fragment or derivative thereof in the absence of the agent to be tested). If the level of the activity in the presence of the agent differs, by an amount that is statistically significant, from the level of the activity in the absence of the agent, then the agent is an agent that alters the activity of PDE4D polypeptide. An increase in the level of PDE4D activity relative to level of the control, indicates that the agent is an agent that enhances (is an agonist of) PDE4D activity. Similarly, a decrease in the level of PDE4D activity relative to level of the control, indicates that the agent is an agent that inhibits (is an antagonist of) PDE4D activity. In another embodiment, the level of activity of a PDE4D polypeptide or derivative or fragment thereof in the presence of the agent to be tested, is compared with a control level that has previously been established. A level of the activity in the presence of the agent that differs from the control level by an amount that is statistically significant indicates that the agent alters PDE4D activity.

[0155] The present invention also relates to an assay for identifying agents which alter the expression of the PDE4D gene (e.g., antisense nucleic acids, fusion proteins, polypeptides, peptidomimetics, prodrugs, receptors, binding agents, antibodies, small molecules or other drugs, or ribozymes) which alter (e.g., increase or decrease) expression (e.g., transcription or translation) of the gene or which otherwise interact with the nucleic acids described herein, as well as agents identifiable by the assays. For example, a solution containing a nucleic acid encoding PDE4D polypeptide (e.g., PDE4D gene) can be contacted with an agent to be tested. The solution can comprise, for example, cells containing the nucleic acid or cell lysate containing the nucleic acid; alternatively, the solution can be another solution that comprises elements necessary for transcription/translation of the nucleic acid. Cells not suspended in solution can also be employed, if desired. The level and/or pattern of PDE4D expression (e.g., the level and/or pattern of mRNA or of protein expressed, such as the level and/or pattern of different splicing variants) is assessed, and is compared with the level and/or pattern of expression in a control (i.e., the level and/or pattern of the PDE4D expression in the absence of the agent to be tested). If the level and/or pattern in the presence of the agent differ, by an amount or in a manner that is statistically significant, from the level and/or pattern in the absence of the agent, then the agent is an agent that alters the expression of PDE4D. Enhancement of PDE4D expression indicates that the agent is an agonist of PDE4D activity. Similarly, inhibition of PDE4D expression indicates that the agent is an antagonist of PDE4D activity. In another embodiment, the level and/or pattern of PDE4D polypeptide(s) (e.g., different splicing variants) in the presence of the agent to be tested, is compared with a control level and/or pattern that have previously been established. A level and/or pattern in the presence of the agent that differs from the control level and/or pattern by an amount or in a manner that is statistically significant indicates that the agent alters PDE4D expression. In one embodiment, agents that can alter expression levels of isoforms PDE4D7 and/or PDE4D9 can be assessed, preferably to complement the expression levels to approximate the ratios of a healthy individual.

[0156] In another embodiment of the invention, agents which alter the expression of the PDE4D gene or which otherwise interact with the nucleic acids described herein, can be identified using a cell, cell lysate, or solution containing a nucleic acid encoding the promoter region of the PDE4D gene operably linked to a reporter gene. After contact with an agent to be tested, the level of expression of the reporter gene (e.g., the level of mRNA or of protein expressed) is assessed, and is compared with the level of expression in a control (i.e., the level of the expression of the reporter gene in the absence of the agent to be tested). If the level in the presence of the agent differs, by an amount or in a manner that is statistically significant, from the level in the absence of the agent, then the agent is an agent that alters the expression of PDE4D, as indicated by its ability to alter expression of a gene that is operably linked to the PDE4D gene promoter. Enhancement of the expression of the reporter indicates that the agent is an agonist of PDE4D activity. Similarly, inhibition of the expression of the reporter indicates that the agent is an antagonist of PDE4D activity. In another embodiment, the level of expression of the reporter in the presence of the agent to be tested, is compared with a control level that has previously been established. A level in the presence of the agent that differs from the control level by an amount or in a manner that is statistically significant indicates that the agent alters PDE4D expression.

[0157] Agents which alter the amounts of different splicing variants encoded by PDE4D (e.g., an agent which enhances activity of a first splicing variant, and which inhibits activity of a second splicing variant), as well as agents which are agonists of activity of a first splicing variant and antagonists of activity of a second splicing variant, can easily be identified using these methods described above. In other embodiments of the invention, assays can be used to assess the impact of a test agent on the activity of a polypeptide in relation to a PDE4D binding agent. For example, a cell that expresses a compound that interacts with PDE4D (herein referred to as a “PDE4D binding agent”, which can be a polypeptide or other molecule that interacts with PDE4D, such as a receptor) is contacted with PDE4D in the presence of a test agent, and the ability of the test agent to alter the interaction between PDE4D and the PDE4D binding agent is determined. Alternatively, a cell lysate or a solution containing the PDE4D binding agent, can be used. An agent which binds to PDE4D or the PDE4D binding agent can alter the interaction by interfering with, or enhancing the ability of PDE4D to bind to, associate with, or otherwise interact with the PDE4D binding agent. Determining the ability of the test agent to bind to PDE4D or an PDE4D binding agent can be accomplished, for example, by coupling the test agent with a radioisotope or enzymatic label such that binding of the test agent to the polypeptide can be determined by detecting the labeled with ¹²⁵I, ³⁵S, ¹⁴C or ³H, either directly or indirectly, and the radioisotope detected by direct counting of radioemmission or by scintillation counting. Alternatively, test agents can be enzymatically labeled with, for example, horseradish peroxidase, alkaline phosphatase, or luciferase, and the enzymatic label detected by determination of conversion of an appropriate substrate to product. It is also within the scope of this invention to determine the ability of a test agent to interact with the polypeptide without the labeling of any of the interactants. For example, a microphysiometer can be used to detect the interaction of a test agent with PDE4D or a PDE4D binding agent without the labeling of either the test agent, PDE4D, or the PDE4D binding agent. McConnell, H. M. et al. (1992) Science, 257:1906-1912. As used herein, a “microphysiometer” (e.g., Cytosensor™) is an analytical instrument that measures the rate at which a cell acidifies its environment using a light-addressable potentiometric sensor (LAPS). Changes in this acidification rate can be used as an indicator of the interaction between ligand and polypeptide. See the Examples Section for a discussion of known PDE4D binding partners. Thus, these receptors can be used to screen for compounds that are PDE4D receptor agonists for use in treating stroke or PDE4D receptor antagonists for studying stroke. The linkage data provided herein, for the first time, provides such connection to stroke. Drugs could be designed to regulate PDE4D receptor activation that in turn can be used to regulate signaling pathways and transcription events of genes downstream, such as Cbfa1.

[0158] In another embodiment of the invention, assays can be used to identify polypeptides that interact with one or more PDE4D polypeptides, as described herein. For example, a yeast two-hybrid system such as that described by Fields and Song (Fields, S. and Song, O., Nature 340:245-246 (1989)) can be used to identify polypeptides that interact with one or more PDE4D polypeptides. In such a yeast two-hybrid system, vectors are constructed based on the flexibility of a transcription factor that has two functional domains (a DNA binding domain and a transcription activation domain). If the two domains are separated but fused to two different proteins that interact with one another, transcriptional activation can be achieved, and transcription of specific markers (e.g., nutritional markers such as His and Ade, or color markers such as lacZ) can be used to identify the presence of interaction and transcriptional activation. For example, in the methods of the invention, a first vector is used which includes a nucleic acid encoding a DNA binding domain and also an PDE4D polypeptide, splicing variant, fragment or derivative thereof, and a second vector is used which includes a nucleic acid encoding a transcription activation domain and also a nucleic acid encoding a polypeptide which potentially may interact with the PDE4D polypeptide, splicing variant, or fragment or derivative thereof (e.g., a PDE4D polypeptide binding agent or receptor). Incubation of yeast containing the first vector and the second vector under appropriate conditions (e.g., mating conditions such as used in the Matchmaker™ System from Clontech) allows identification of colonies which express the markers of interest. These colonies can be examined to identify the polypeptide(s) that interact with the PDE4D polypeptide or fragment or derivative thereof. Such polypeptides may be useful as agents that alter the activity of expression of a PDE4D polypeptide, as described above.

[0159] In more than one embodiment of the above assay methods of the present invention, it may be desirable to immobilize either PDE4D, the PDE4D binding agent, or other components of the assay on a solid support, in order to facilitate separation of complexed from uncomplexed forms of one or both of the polypeptides, as well as to accommodate automation of the assay. Binding of a test agent to the polypeptide, or interaction of the polypeptide with a binding agent in the presence and absence of a test agent, can be accomplished in any vessel suitable for containing the reactants. Examples of such vessels include microtitre plates, test tubes, and micro-centrifuge tubes. In one embodiment, a fusion protein (e.g., a glutathione-S-transferase fusion protein) can be provided which adds a domain that allows PDE4D or a PDE4D binding agent to be bound to a matrix or other solid support.

[0160] In another embodiment, modulators of expression of nucleic acid molecules of the invention are identified in a method wherein a cell, cell lysate, or solution containing a nucleic acid encoding PDE4D is contacted with a test agent and the expression of appropriate mRNA or polypeptide (e.g., splicing variant(s)) in the cell, cell lysate, or solution, is determined. The level of expression of appropriate mRNA or polypeptide(s) in the presence of the test agent is compared to the level of expression of mRNA or polypeptide(s) in the absence of the test agent. The test agent can then be identified as a modulator of expression based on this comparison. For example, when expression of mRNA or polypeptide is greater (statistically significantly greater) in the presence of the test agent than in its absence, the test agent is identified as a stimulator or enhancer of the mRNA or polypeptide expression. Alternatively, when expression of the mRNA or polypeptide is less (statistically significantly less) in the presence of the test agent than in its absence, the test agent is identified as an inhibitor of the mRNA or polypeptide expression. The level of mRNA or polypeptide expression in the cells can be determined by methods described herein for detecting mRNA or polypeptide.

[0161] This invention further pertains to novel agents identified by the above-described screening assays. Accordingly, it is within the scope of this invention to further use an agent identified as described herein in an appropriate animal model. For example, an agent identified as described herein (e.g., a test agent that is a modulating agent, an antisense nucleic acid molecule, a specific antibody, or a polypeptide-binding agent) can be used in an animal model to determine the efficacy, toxicity, or side effects of treatment with such an agent. Alternatively, an agent identified as described herein can be used in an animal model to determine the mechanism of action of such an agent. Furthermore, this invention pertains to uses of novel agents identified by the above-described screening assays for treatments as described herein. In addition, an agent identified as described herein can be used to alter activity of a polypeptide encoded by PDE4D, or to alter expression of PDE4D, by contacting the polypeptide or the gene (or contacting a cell comprising the polypeptide or the gene) with the agent identified as described herein.

Pharmaceutical Compositions

[0162] The present invention also pertains to pharmaceutical compositions comprising agents described herein, particularly nucleotides encoding the polypeptides described herein; comprising polypeptides described herein (e.g., one or more of SEQ ID NO: 2, 3, 4, 5, 6, 7, 8, 9, 10, 12 or 14); and/or comprising other splicing variants encoded by PDE4D; and/or an agent that alters (e.g., enhances or inhibits) PDE4D gene expression or PDE4D polypeptide activity as described herein. For instance, a polypeptide, protein (e.g., an PDE4D receptor), an agent that alters PDE4D gene expression, or a PDE4D binding agent or binding partner, fragment, fusion protein or prodrug thereof, or a nucleotide or nucleic acid construct (vector) comprising a nucleotide of the present invention, or an agent that alters PDE4D polypeptide activity, can be formulated with a physiologically acceptable carrier or excipient to prepare a pharmaceutical composition. The carrier and composition can be sterile. The formulation should suit the mode of administration.

[0163] Suitable pharmaceutically acceptable carriers include but are not limited to water, salt solutions (e.g., NaCl), saline, buffered saline, alcohols, glycerol, ethanol, gum arabic, vegetable oils, benzyl alcohols, polyethylene glycols, gelatin, carbohydrates such as lactose, amylose or starch, dextrose, magnesium stearate, talc, silicic acid, viscous paraffin, perfume oil, fatty acid esters, hydroxymethylcellulose, polyvinyl pyrolidone, etc., as well as combinations thereof. The pharmaceutical preparations can, if desired, be mixed with auxiliary agents, e.g., lubricants, preservatives, stabilizers, wetting agents, emulsifiers, salts for influencing osmotic pressure, buffers, coloring, flavoring and/or aromatic substances and the like which do not deleteriously react with the active agents.

[0164] The composition, if desired, can also contain minor amounts of wetting or emulsifying agents, or pH buffering agents. The composition can be a liquid solution, suspension, emulsion, tablet, pill, capsule, sustained release formulation, or powder. The composition can be formulated as a suppository, with traditional binders and carriers such as triglycerides. Oral formulation can include standard carriers such as pharmaceutical grades of mannitol, lactose, starch, magnesium stearate, polyvinyl pyrolidone, sodium saccharine, cellulose, magnesium carbonate, etc.

[0165] Methods of introduction of these compositions include, but are not limited to, intradermal, intramuscular, intraperitoneal, intraocular, intravenous, subcutaneous, topical, oral and intranasal. Other suitable methods of introduction can also include gene therapy (as described below), rechargeable or biodegradable devices, particle acceleration devises (“gene guns”) and slow release polymeric devices. The pharmaceutical compositions of this invention can also be administered as part of a combinatorial therapy with other agents.

[0166] The composition can be formulated in accordance with the routine procedures as a pharmaceutical composition adapted for administration to human beings. For example, compositions for intravenous administration typically are solutions in sterile isotonic aqueous buffer. Where necessary, the composition may also include a solubilizing agent and a local anesthetic to ease pain at the site of the injection. Generally, the ingredients are supplied either separately or mixed together in unit dosage form, for example, as a dry lyophilized powder or water free concentrate in a hermetically sealed container such as an ampule or sachette indicating the quantity of active agent. Where the composition is to be administered by infusion, it can be dispensed with an infusion bottle containing sterile pharmaceutical grade water, saline or dextrose/water. Where the composition is administered by injection, an ampule of sterile water for injection or saline can be provided so that the ingredients may be mixed prior to administration.

[0167] For topical application, nonsprayable forms, viscous to semi-solid or solid forms comprising a carrier compatible with topical application and having a dynamic viscosity preferably greater than water, can be employed. Suitable formulations include but are not limited to solutions, suspensions, emulsions, creams, ointments, powders, enemas, lotions, sols, liniments, salves, aerosols, etc., which are, if desired, sterilized or mixed with auxiliary agents, e.g., preservatives, stabilizers, wetting agents, buffers or salts for influencing osmotic pressure, etc. The agent may be incorporated into a cosmetic formulation. For topical application, also suitable are sprayable aerosol preparations wherein the active ingredient, preferably in combination with a solid or liquid inert carrier material, is packaged in a squeeze bottle or in admixture with a pressurized volatile, normally gaseous propellant, e.g., pressurized air.

[0168] Agents described herein can be formulated as neutral or salt forms. Pharmaceutically acceptable salts include those formed with free amino groups such as those derived from hydrochloric, phosphoric, acetic, oxalic, tartaric acids, etc., and those formed with free carboxyl groups such as those derived from sodium, potassium, ammonium, calcium, ferric hydroxides, isopropylamine, triethylamine, 2-ethylamino ethanol, histidine, procaine, etc.

[0169] The agents are administered in a therapeutically effective amount. The amount of agents which will be therapeutically effective in the treatment of a particular disorder or condition will depend on the nature of the disorder or condition, and can be determined by standard clinical techniques. In addition, in vitro or in vivo assays may optionally be employed to help identify optimal dosage ranges. The precise dose to be employed in the formulation will also depend on the route of administration, and the seriousness of the symptoms of stroke, and should be decided according to the judgment of a practitioner and each patient's circumstances. Effective doses may be extrapolated from dose-response curves derived from in vitro or animal model test systems.

[0170] The invention also provides a pharmaceutical pack or kit comprising one or more containers filled with one or more of the ingredients of the pharmaceutical compositions of the invention. Optionally associated with such container(s) can be a notice in the form prescribed by a governmental agency regulating the manufacture, use or sale of pharmaceuticals or biological products, which notice reflects approval by the agency of manufacture, use of sale for human administration. The pack or kit can be labeled with information regarding mode of administration, sequence of drug administration (e.g., separately, sequentially or concurrently), or the like. The pack or kit may also include means for reminding the patient to take the therapy. The pack or kit can be a single unit dosage of the combination therapy or it can be a plurality of unit dosages. In particular, the agents can be separated, mixed together in any combination, present in a single vial or tablet. Agents assembled in a blister pack or other dispensing means is preferred. For the purpose of this invention, unit dosage is intended to mean a dosage that is dependent on the individual pharmacodynamics of each agent and administered in FDA approved dosages in standard time courses.

Methods of Therapy

[0171] The present invention encompasses methods of treatment (prophylactic and/or therapeutic) for stroke or a susceptibility to stroke, such as individuals in the target populations described herein particularly ischemic (e.g., carotid and cardiogenic strokes) and TIA, using a PDE4D therapeutic agent. A “PDE4D therapeutic agent” is an agent that alters (e.g., enhances or inhibits) PDE4D polypeptide (enzymatic activity) and/or PDE4D gene expression, as described herein (e.g., a PDE4D agonist or antagonist). PDE4D therapeutic agents can alter PDE4D polypeptide activity or nucleic acid expression by a variety of means, such as, for example, by providing additional PDE4D polypeptide or by upregulating the transcription or translation of the PDE4D gene; by altering posttranslational processing of the PDE4D polypeptide; by altering transcription of PDE4D splicing variants; or by interfering with PDE4D polypeptide activity (e.g., by binding to a PDE4D polypeptide), or by downregulating the transcription or translation of the PDE4D gene.

[0172] In particular, the invention relates to methods of treatment for stroke or susceptibility to stroke (for example, for individuals in an at-risk population such as those described herein); as well as to methods of treatment for myocardial infarction, atherosclerosis, acute coronary syndrome (e.g., unstable angina, non-ST-elevation myocardial infarction (NSTEMI) or ST-elevation myocardial infarction (STEMI)); for decreasing risk of a second myocardial infarction; for atherosclerosis, such as for patients requiring treatment (e.g., angioplasty, stents, coronary artery bypass graft) to restore blood flow in arteries (e.g., coronary arteries) and peripheral arterial occlusive disease.

[0173] Representative PDE4D therapeutic agents include the following:
[0174] nucleic acids or fragments or derivatives thereof described herein, particularly nucleotides encoding the polypeptides described herein and vectors comprising such nucleic acids (e.g., a gene, cDNA, and/or mRNA, double-stranded interfering RNA, a nucleic acid encoding a PDE4D polypeptide or active fragment or derivative thereof, or an oligonucleotide; for example, SEQ ID NO: 1 which may optionally comprise at least one polymorphism shown in Tables 11 and 12 or a nucleic acid encoding SEQ ID NO: 2, 3, 4, 5, 6, 7, 8, 9, 10, 12 or 14, or fragments or derivatives thereof), antisense nucleic acids or small double-stranded interfering RNA;
[0175] polypeptides described herein (e.g., one or more of SEQ ID NO: 2, 3, 4, 5, 6, 7, 8, 9, 10, 12 or 14, and/or other splicing variants encoded by PDE4D, or fragments or derivatives thereof);
[0176] other polypeptides (e.g., PDE4D receptors); PDE4D binding agents; peptidomimetics; fusion proteins or prodrugs thereof; antibodies (e.g., an antibody to a mutant PDE4D polypeptide, or an antibody to a non-mutant PDE4D polypeptide, or an antibody to a particular splicing variant encoded by PDE4D, as described above); ribozymes; other small molecules;
[0177] and other agents that alter (e.g., inhibit or antagonize) PDE4D gene expression or polypeptide activity, or that regulate transcription of PDE4D splicing variants (e.g., agents that affect which splicing variants are expressed, or that affect the amount of each splicing variant that is expressed).

[0178] More than one PDE4D therapeutic agent can be used concurrently, if desired.

[0179] The PDE4D therapeutic agent that is a nucleic acid is used in the treatment of stroke. The term, “treatment” as used herein, refers not only to ameliorating symptoms associated with the disease, but also preventing or delaying the onset of the disease, and also lessening the severity or frequency of symptoms of the disease, preventing or delaying the occurrence of a second episode of the disease or condition; and/or also lessening the severity or frequency of symptoms of the disease or condition. In the case of atherosclerosis, “treatment” also refers to a minimization or reversal of the development of plaques. The therapy is designed to alter (e.g., inhibit or enhance), replace or supplement activity of a PDE4D polypeptide in an individual. For example, a PDE4D therapeutic agent can be administered in order to upregulate or increase the expression or availability of the PDE4D gene or of specific splicing variants of PDE4D, or, conversely, to downregulate or decrease the expression or availability of the PDE4D gene or specific splicing variants of PDE4D. Upregulation or increasing expression or availability of a native PDE4D gene or of a particular splicing variant could interfere with or compensate for the expression or activity of a defective gene or another splicing variant; downregulation or decreasing expression or availability of a native PDE4D gene or of a particular splicing variant could minimize the expression or activity of a defective gene or the particular splicing variant and thereby minimize the impact of the defective gene or the particular splicing variant.

[0180] The PDE4D therapeutic agent(s) are administered in a therapeutically effective amount (i.e., an amount that is sufficient to treat the disease, such as by ameliorating symptoms associated with the disease, preventing or delaying the onset of the disease, and/or also lessening the severity or frequency of symptoms of the disease). The amount which will be therapeutically effective in the treatment of a particular individual's disorder or condition will depend on the symptoms and severity of the disease, and can be determined by standard clinical techniques. In addition, in vitro or in vivo assays may optionally be employed to help identify optimal dosage ranges. The precise dose to be employed in the formulation will also depend on the route of administration, and the seriousness of the disease or disorder, and should be decided according to the judgment of a practitioner and each patient's circumstances. Effective doses may be extrapolated from dose-response curves derived from in vitro or animal model test systems.

[0181] In one embodiment, a nucleic acid of the invention (e.g., a nucleic acid encoding a PDE4D polypeptide, such as SEQ ID NO: 1 which may optionally comprise at least one polymorphism shown in Tables 11 and 12; or another nucleic acid that encodes a PDE4D polypeptide or a splicing variant, derivative or fragment thereof, such as a nucleic acid encoding SEQ ID NO: 2, 3, 4, 5, 6, 7, 8, 9, 10, 12 or 14) can be used, either alone or in a pharmaceutical composition as described above. For example, PDE4D or a cDNA encoding the PDE4D polypeptide, either by itself or included within a vector, can be introduced into cells (either in vitro or in vivo) such that the cells produce native PDE4D polypeptide. If necessary, cells that have been transformed with the gene or cDNA or a vector comprising the gene or cDNA can be introduced (or re-introduced) into an individual affected with the disease. Thus, cells which, in nature, lack native PDE4D expression and activity, or have mutant PDE4D expression and activity, or have expression of a disease-associated PDE4D splicing variant, can be engineered to express PDE4D polypeptide or an active fragment of the PDE4D polypeptide (or a different variant of PDE4D polypeptide). In another embodiment, nucleic acid encoding the PDE4D polypeptide, or an active fragment or derivative thereof, can be introduced into an expression vector, such as a viral vector, and the vector can be introduced into appropriate cells in an animal. Other gene transfer systems, including viral and nonviral transfer systems, can be used. Alternatively, nonviral gene transfer methods, such as calcium phosphate coprecipitation, mechanical techniques (e.g., microinjection); membrane fusion-mediated transfer via liposomes; or direct DNA uptake, can also be used.

[0182] Alternatively, in another embodiment of the invention, a nucleic acid of the invention; a nucleic acid complementary to a nucleic acid of the invention; or a portion of such a nucleic acid (e.g., an oligonucleotide as described below), can be used in “antisense” therapy, in which a nucleic acid (e.g., an oligonucleotide) which specifically hybridizes to the mRNA and/or genomic DNA of PDE4D is administered or generated in situ. The antisense nucleic acid that specifically hybridizes to the mRNA and/or DNA inhibits expression of the PDE4D polypeptide, e.g., by inhibiting translation and/or transcription. Binding of the antisense nucleic acid can be by conventional base pair complementarity, or, for example, in the case of binding to DNA duplexes, through specific interaction in the major groove of the double helix.

[0183] An antisense construct of the present invention can be delivered, for example, as an expression plasmid as described above. When the plasmid is transcribed in the cell, it produces RNA that is complementary to a portion of the mRNA and/or DNA that encodes PDE4D polypeptide. Alternatively, the antisense construct can be an oligonucleotide probe that is generated ex vivo and introduced into cells; it then inhibits expression by hybridizing with the mRNA and/or genomic DNA of PDE4D. In one embodiment, the oligonucleotide probes are modified oligonucleotides that are resistant to endogenous nucleases, e.g., exonucleases and/or endonucleases, thereby rendering them stable in vivo. Exemplary nucleic acid molecules for use as antisense oligonucleotides are phosphoramidate, phosphothioate and methylphosphonate analogs of DNA (see also U.S. Pat. Nos. 5,176,996; 5,264,564; and 5,256,775). Additionally, general approaches to constructing oligomers useful in antisense therapy are also described, for example, by Van der Krol et al. ((1988) Biotechniques 6:958-976); and Stein et al. ((1988) Cancer Res 48:2659-2668). With respect to antisense DNA, oligodeoxyribonucleotides derived from the translation initiation site, e.g., between the −10 and +10 regions of PDE4D sequence, are preferred.

[0184] To perform antisense therapy, oligonucleotides (mRNA, cDNA or DNA) are designed that are complementary to mRNA encoding PDE4D. The antisense oligonucleotides bind to PDE4D mRNA transcripts and prevent translation. Absolute complementarity, although preferred, is not required. a sequence “complementary” to a portion of an RNA, as referred to herein, indicates that a sequence has sufficient complementarity to be able to hybridize with the RNA, forming a stable duplex; in the case of double-stranded antisense nucleic acids, a single strand of the duplex DNA may thus be tested, or triplex formation may be assayed. The ability to hybridize will depend on both the degree of complementarity and the length of the antisense nucleic acid, as described in detail above. Generally, the longer the hybridizing nucleic acid, the more base mismatches with an RNA it may contain and still form a stable duplex (or triplex, as the case may be). One skilled in the art can ascertain a tolerable degree of mismatch by use of standard procedures. The oligonucleotides used in antisense therapy can be DNA, RNA, or chimeric mixtures or derivatives or modified versions thereof, single-stranded or double-stranded. The oligonucleotides can be modified at the base moiety, sugar moiety, or phosphate backbone, for example, to improve stability of the molecule, hybridization, etc. The oligonucleotides can include other appended groups such as peptides (e.g., for targeting host cell receptors in vivo), or agents facilitating transport across the cell membrane (see, e.g., Letsinger et al. (1989) Proc. Natl. Acad. Sci. USA 86:6553-6556; Lemaitre et al., (1987), Proc. Natl. Acad. Sci. USA 84:648-652; PCT International Publication No. WO88/09810) or the blood-brain barrier (see, e.g., PCT International Publication No. WO89/10134), or hybridization-triggered cleavage agents (see, e.g., Krol et al. (1988) BioTechniques 6:958-976) or intercalating agents. (See, e.g., Zon, (1988), Pharm. Res. 5:539-549). To this end, the oligonucleotide may be conjugated to another molecule (e.g., a peptide, hybridization triggered cross-linking agent, transport agent, hybridization-triggered cleavage agent).

[0185] The antisense molecules are delivered to cells that express PDE4D in vivo. A number of methods can be used for delivering antisense DNA or RNA to cells; e.g., antisense molecules can be injected directly into the tissue site, or modified antisense molecules, designed to target the desired cells (e.g., antisense linked to peptides or antibodies that specifically bind receptors or antigens expressed on the target cell surface) can be administered systematically. Alternatively, in another embodiment, a recombinant DNA construct is utilized in which the antisense oligonucleotide is placed under the control of a strong promoter (e.g., pol III or pol II). The use of such a construct to transfect target cells in the patient results in the transcription of sufficient amounts of single stranded RNAs that will form complementary base pairs with the endogenous PDE4D transcripts and thereby prevent translation of the PDE4D mRNA. For example, a vector can be introduced in vivo such that it is taken up by a cell and directs the transcription of an antisense RNA. Such a vector can remain episomal or become chromosomally integrated, as long as it can be transcribed to produce the desired antisense RNA. Such vectors can be constructed by recombinant DNA technology methods standard in the art and described above. For example, a plasmid, cosmid, YAC or viral vector can be used to prepare the recombinant DNA construct that can be introduced directly into the tissue site. Alternatively, viral vectors can be used which selectively infect the desired tissue, in which case administration may be accomplished by another route (e.g., systemically).

[0186] Methods of modulating PDE4D expression by administering an RNA inhibitor of the activity of the target protein are also possible. The term “RNA inhibitor” refers to an inhibitory RNA that silences expression of the target protein by RNA interference (McManus, M. T. and Sharp, P. A., 2002. Nat. Rev. Genet. 3:737-47; Hannon, G. J., 2002. Nature 418:244-51; Paddison, P. J. and Hannon, G. J., 2002. Cancer Cell 2:17-23). RNA interference is conserved throughout evolution, from C. elegans to humans, and is believed to function in protecting cells from invasion by RNA viruses. When a cell is infected by a dsRNA virus, the dsRNA is recognized and targeted for cleavage by an RNaseIII-type enzyme termed Dicer. The Dicer enzyme “dices” the RNA into short duplexes of 21 nucleotides, termed short-interfering RNAs or siRNAs, composed of 19 nucleotides of perfectly paired ribonucleotides with two unpaired nucleotides on the 3′ end of each strand. These short duplexes associate with a multiprotein complex termed RISC, and direct this complex to mRNA transcripts with sequence similarity to the siRNA. As a result, nucleases present in the RISC complex cleave the mRNA transcript, thereby abolishing expression of the gene product. In the case of viral infection, this mechanism would result in destruction of viral transcripts, thus preventing viral synthesis. Since the siRNAs are double-stranded, either strand has the potential to associate with RISC and direct silencing of transcripts with sequence similarity.

[0187] Recently, it was determined that gene silencing could be induced by presenting the cell with the siRNA, mimicking the product of Dicer cleavage (Elbashir, S. M., et al., 2001. Nature 411:494-8; Elbashir, S. M., et al., 2001. Genes Dev. 15:188-200). Synthetic siRNA duplexes maintain the ability to associate with RISC and direct silencing of mRNA transcripts, thus providing researchers with a powerful tool for gene silencing in mammalian cells. Yet another method to introduce the dsRNA for gene silencing is shRNA, for short hairpin RNA (Paddison, P. J., et al., 2002. Genes Dev. 16:948-58; Brummelkamp, T. R., et al., 2002 Science 296:550-3; Sui, G., et al., 2002. Proc. Natl. Acad. Sci. U.S.A. 99:5515-20). In this case, a desired siRNA sequence is expressed from a plasmid (or virus) containing an “shRNA” gene having an inverted repeat with an intervening loop sequence to form a hairpin structure. The resulting shRNA transcript containing the hairpin is subsequently processed by Dicer to produce siRNAs for silencing. Plasmid-based shRNAs can be expressed stably in cells, allowing long-term gene silencing in cells, or even in animals (McCaffrey, A. P., et al., 2002. Nature 418:38-9; Xia, H., et al., 2002. Nat. Biotech. 20:1006-10; Lewis, D. L., et al., 2002. Nat. Genetics 32:107-8; Rubinson, D. A., et al., 2003. Nat. Genetics 33:401-6; Tiscornia, G., et al., (2003) Proc. Natl. Acad. Sci. U.S.A. 100: 1844-8). RNA interference has been successfully used therapeutically to protect mice from fulminant hepatitis (Song, E., et al., 2003. Nat. Medicine 9:347-51).

[0188] Endogenous PDE4D expression can be also reduced by inactivating or “knocking out” PDE4D or its promoter using targeted homologous recombination (e.g., see Smithies et al. (1985) Nature 317:230-234; Thomas & Capecchi (1987) Cell 51:503-512; Thompson et al. (1989) Cell 5:313-321). For example, a mutant, non-functional PDE4D (or a completely unrelated DNA sequence) flanked by DNA homologous to the endogenous PDE4D (either the coding regions or regulatory regions of PDE4D) can be used, with or without a selectable marker and/or a negative selectable marker, to transfect cells that express PDE4D in vivo. Insertion of the DNA construct, via targeted homologous recombination, results in inactivation of PDE4D. The recombinant DNA constructs can be directly administered or targeted to the required site in vivo using appropriate vectors, as described above. Alternatively, expression of non-mutant PDE4D can be increased using a similar method: targeted homologous recombination can be used to insert a DNA construct comprising a non-mutant, functional PDE4D (e.g., a gene having SEQ ID NO: 1 which may optionally comprise at least one polymorphism shown in Tables 11 and 12), or a portion thereof, in place of a mutant PDE4D in the cell, as described above. In another embodiment, targeted homologous recombination can be used to insert a DNA construct comprising a nucleic acid that encodes a PDE4D polypeptide variant that differs from that present in the cell.

[0189] Alternatively, endogenous PDE4D expression can be reduced by targeting deoxyribonucleotide sequences complementary to the regulatory region of PDE4D (i.e., the PDE4D promoter and/or enhancers) to form triple helical structures that prevent transcription of PDE4D in target cells in the body. (See generally, Helene, C. (1991) Anticancer Drug Des., 6(6):569-84; Helene, C., et al. (1992) Ann, N.Y. Acad. Sci., 660:27-36; and Maher, L. J. (1992) Bioassays 14(12):807-15). Likewise, the antisense constructs described herein, by antagonizing the normal biological activity of one of the PDE4D proteins, can be used in the manipulation of tissue, e.g., tissue differentiation, both in vivo and for ex vivo tissue cultures. Furthermore, the anti-sense techniques (e.g., microinjection of antisense molecules, or transfection with plasmids whose transcripts are anti-sense with regard to a PDE4D mRNA or gene sequence) can be used to investigate role of PDE4D in developmental events, as well as the normal cellular function of PDE4D in adult tissue. Such techniques can be utilized in cell culture, but can also be used in the creation of transgenic animals.

[0190] In yet another embodiment of the invention, other PDE4D therapeutic agents as described herein can also be used in the treatment or prevention of stroke. The therapeutic agents can be delivered in a composition, as described above, or by themselves. They can be administered systemically, or can be targeted to a particular tissue. The therapeutic agents can be produced by a variety of means, including chemical synthesis; recombinant production; in vivo production (e.g., a transgenic animal, such as U.S. Pat. No. 4,873,316 to Meade et al.), for example, and can be isolated using standard means such as those described herein.

[0191] A combination of any of the above methods of treatment (e.g., administration of non-mutant PDE4D polypeptide in conjunction with antisense therapy targeting mutant PDE4D mRNA; administration of a first splicing variant encoded by PDE4D in conjunction with antisense therapy targeting a second splicing encoded by PDE4D), can also be used.

[0192] The invention will be further described by the following non-limiting examples. The teachings of all publications cited herein are incorporated herein by reference in their entirety.

### EXAMPLES

### Example 1

### PDE4D Variations and Haplotypes Increase Risk for Stroke

Icelandic Stroke Patients and Phenotype Characterization

[0193] A population-based list containing 2543 Icelandic stroke patients, diagnosed from 1993 through 1997, was derived from two major hospitals in Iceland and the Icelandic Heart Association (the study was approved by the Icelandic Data Protection Commission of Iceland and the National Bioethics Committee). Patients with hemorrhagic stroke represented 6% of all patients (patients with the Icelandic type of hereditary cerebral hemorrhage with amyloidosis and patients with subarachnoid hemorrhage were excluded). Ischemic stroke accounted for 67% of the total patients and TIAs 27%. The distribution of stroke suptypes in this study is similar to that reported in other Caucasian populations (Mohr, J. P., et al., Neurology, 28:754-762 (1978); L. R. Caplan, In Stroke, A Clinical Approach (Butterworth-Heinemann, Stoneham, Mass., ed 3, (1993)).

[0194] The list of approximately 2000 living patients was run through our computerized genealogy database. A comprehensive genealogy database that has been established at deCODE genetics was used to cluster the patients in pedigrees. Each version of the computerized genealogy database was reversibly encrypted by the Data Protection Commission of Iceland before arriving at the laboratory (Gulcher, J. R., et al., Eur. J. Hum. Genet. 8:739 (2000)). The database uses a patient list, with encrypted personal identifiers, as input, and recursive algorithms to find all ancestors in the database who are related to any member on the input list within a given number of generations back (Gulcher, J. R., and Stefansson, K., Clin. Chem. Lab. Med. 36:523 (1998)) covering the whole Icelandic nation. The cluster function then searches for ancestors who are common to any two or more members of the input list. One hundred and seventy-nine families with two or more living patients were chosen for the study with a total of 476 patients connected within 6 meioses (6 meioses connect second cousins). Informed consent was obtained from all patients and their relatives whose DNA samples were used in the linkage scan. The mean separation between affected pairs is 4.8 meioses. Of the patients selected for the study 73% had ischemic strokes, 23% TIAs and 4% hemorrhagic strokes.

[0195] In the selected families, hemorrhagic stroke patients clustered with ischemic stroke and TIA patients, and there were no families with a striking preponderance of hemorrhagic stroke or of the subtypes of ischemic stroke. Patients with ischemic stroke were reclassified according to the TOAST (Trial of Org 10172 in Acute Stroke Treatment) sub-classification system for stroke (Adams, H. P., Jr., et al., Stroke, 24.34-41 (1993)). This system includes five categories: (1) large-artery atherosclerosis, (2) cardioembolism, (3) small-artery occlusion (lacune), (4) stroke of other determined etiology and (5) stroke of undetermined etiology. The diagnoses were based on clinical features and on data from ancillary diagnostic studies. Patients defined with large-artery atherosclerosis had clinical and brain imaging findings of cerebral cortical dysfunction and either significant (>70%) stenosis (this is a stricter criteria than used in TOAST where 50% stenosis is the cut-off) or occlusion of a major brain artery or branch cortical artery. Potential sources of cardiogenic embolism were excluded. The category cardioembolism included patients with at least one cardiac source for an embolus and potential large-artery sources of thromobosis and embolism was eliminated. Patients with small-artery occlusion had one of the traditional clinical lacunar syndromes and no evidence of cerebral cortical dysfunction. Potential cardiac source of embolus and stenosis >70% in an ipsilateral extracranial artery was excluded. The category, acute stroke of other determined etiology, included patients with rare causes of stroke and patients with two or more potential causes of stroke. If the causes of stroke could not be determined despite extensive evaluation patients were included in the category stroke of undetermined etiology. FIG. 1 displays two pedigrees each affected by several of the stroke subtypes, including hemorrhagic stroke. Apparently what is inherited in stroke is the broadly defined phenotype.

Genome-Wide Scan

[0196] A genome-wide scan was performed using a framework map of about 1000 microsatellite markers. The DNA samples were genotyped using approximately 1000 fluorescently labelled primers. A microsatellite screening set based in part on the ABI Linkage Marker (v2) screening set and the ABI Linkage Marker (v2) intercalating set in combination with 500 custom-made markers were developed. All markers were extensively tested for robustness, ease of scoring, and efficiency in 4× multiplex PCR reactions. In the framework marker set, the average spacing between markers was approximately 4 cM with no gaps larger than 10 cM. Marker positions were obtained from the Marshfield map, except for a three-marker putative inversion on chromosome 8 (Jonsdottir, G. M., et al., Am. J. Hum. Genet., 67 (Suppl. 2):332 (2000); Yu, A., et al., Am. J. Hum. Genet. 67 (Suppl. 2):10 (2000). The PCR amplifications were set up, run and pooled on Perkin Elmer/Applied Biosystems 877 Integrated Catalyst Thermocyclers with a similar protocol for each marker. The reaction volume used was 5 μl and for each PCR reaction 20 ng of genomic DNA was amplified in the presence of 2 pmol of each primer, 0.25 U AMPLITAQ GOLD (DNA polymerase; trademark of Roche Molecular Systems), 0.2 mM dNTPs and 2.5 mM MgCl2 (buffer was supplied by manufacturer). The PCR conditions used were 95° C. for 10 minutes, then 37 cycles of 15 s at 94° C., 30 s at 55° C. and 1 min at 72° C. The PCR products were supplemented with the internal size standard and the pools were separated and detected on Applied Biosystems model 377 Sequencer using v3.0 GENESCAN (peak calling software; trademark of Applied Biosystems). Alleles were called automatically with the TRUEALLELE (computer program for alleles identification; trademark of Cybergenetics, Inc.) program, and the program, DECODE-GT (computer editing program that works downstream of the TRUEALLELE program; trademark of deCODE genetics), was used to fractionate according to quality and edit the called genotypes (Palsson, B., et al., Genome Res. 9:1002 (1999)). At least 180 Icelandic controls were genotyped to derive allelic frequencies.

[0197] A total of 476 patients and 438 relatives were genotyped. The data was analyzed and the statistical significance determined by applying affecteds-only allele-sharing methods (which does not specify any particular inheritance model) implemented in the ALLEGRO (computer program for multipoint linkage analysis; trademark of deCODE genetics) program that calculates lod scores based on multipoint calculations. Our baseline linkage analysis uses the Sₚₐᵢᵣₛ scoring function (Kruglyak, L., et al., Am. J. Hum. Genet., 58:1347 (1996)), the exponential allele-sharing model (Kong, A. and Cox, N. J., Am. J. Hum. Genet., 61:1179 (1997)), and a family weighting scheme which is halfway, on the log scale, between weighting each affected pair equally and weighting each family equally. In the analysis we treat all genotyped individuals who are not affected as “unknown”. All linkage analyses in this paper were performed using multipoint calculation with the program ALLEGRO (deCODE genetics) (Gudbjartsson, D. F., et al., Nat. Genet. 25:12 (2000)).

[0198] The allele sharing lod scores for the genome scan using the framework map showed three regions that achieved a lod score above 1.0. Two of these regions are on chromosome 5q. The first peak is at approximately 69 cM with a lod score of 2.00. The second peak is at 99 cM with a lod score of 1.14. The third region is on chromosome 14q at 55 cM with a lod score of 1.24.

[0199] The information for linkage at the 5q locus was increased by genotyping an additional 45 markers over a 45 cM segment which spanned both peaks. The information used here is defined by Nicolae (D. L. Nicolae, Thesis, University of Chicago (1999)) and has been demonstrated to be asymptotically equivalent to a classical measure of the fraction of missing information (Dempster, A. P., et al., J R. Statist. Soc. B, 39:1 (1977)). While the lod score at the second peak dropped slightly to around 1.05, the lod score at the first peak increased to 3.39. However, close inspection of our results suggested that not only does the Marshfield genetic map lack resolution (many markers assigned the same map location), but also there may be some errors in their order. As a result, the genetic length of the region estimated using our material was substantially greater than what is reported. By modifying the ALLEGRO (deCODE genetics) program, we applied the EM algorithm to our data to estimate the genetic distances between markers. We found that our estimate of the genetic length of the region was substantially longer than that given in the Marshfield map. This indicates a problem with marker order because, in general, incorrect marker order leads to an increased number of apparent crossovers and increases the apparent genetic length.

Physical and Genetic Mapping

[0200] The marker order and inter-marker distances were improved by constructing high density physical and genetic maps over a 20 cM region between markers D5S474 and D5S2046. A combination of data from coincident hybridizations of BAC membranes using a high density of STSs and the Fingerprinting Contig database was used to build large contigs of BACs from the RPCI-11 library. The order of the linkage markers was also confirmed by high-resolution genetic mapping using the stroke families supplemented with over 112 other large nuclear families. High resolution genetic mapping was used both to anchor and place in order contigs found by physical mapping as well as to obtain accurate inter-marker distances for the correctly ordered markers. Data from 112 Icelandic nuclear families (sibships with their parents, containing from two to seven siblings) were analyzed together with the nuclear families available within the stroke pedigrees. For the purpose of genetic mapping the 112 nuclear families alone provide 588 meioses, and the total number of meioses available for mapping was over 2000. By comparison, the Marshfield genetic map was constructed based on 182 meioses. The large number of meiotic events within our families provides the ability to map markers to the resolution of 0.5 to 1.0 cM. Combining this information with the physical map resulted in a highly reliable order of markers and inter-marker distances within this 20 cM region. Linkage markers common to the genetic and physical maps were used to anchor and place in order four of the physically mapped contigs. By integrating the genetic and physical maps a most likely order of 30 polymorphic markers was derived.

[0201] BAC contigs were generated by a method that combines coincident primer hybridization with data mining. The RPCI-11 human male BAC library segments 1 & 2 (Pieter de Jong, Children's Hospital Oakland Research Institute) containing about 200,000 clones with a 12× coverage, were gridded using a 6×6 double offset pattern in 23 cm×23 cm membranes with a BioGrid robot (Biorobotics Ltd., Cambridge, UK). Initially, hybridizations were performed with markers in the region of interest according to their location in the Weizmann Institute Unified Database. Primer sequences were analyzed and discarded according to their content of known repeats, E. Coli and vector sequences (the analysis was performed using software developed at deCODE genetics). One hundred and fifty markers in the region (30 polymorphic markers used in linkage and 120 generated from STSs) separated by an average of 130 kb were used. The selected markers were used to generate two ³²P labelled probes, F that contained the pooled forward primers and R that contained the pooled reverse primers. Reading of positive signals was performed automatically from digitized images of resulting autoradiograms by informatics tools developed at deCODE genetics. The coincident signals in both hybridizations were selected as positive clones. A set of overlapping clones was assembled through a combination of hybridization and BAC fingerprint walking. Fingerprints of positive clones were analyzed using the FPC database developed at the Sanger Center. Data from FPC contigs prebuilt with a cutoff of 3e-12 and from sequence datamining was integrated with the hybridization results. BACs in the region detected by data mining and hybridization were re-arrayed using a Multiprobe IIex robot (Packard, Meriden, Conn.). Small membranes (8 cm×12 cm) were gridded in 6×6 double offset pattern and individually hybridized with the markers of interest. Positive patterns were transferred using transparencies to an Excel file containing macros to provide BAC to marker associations. A visual map was generated by combining the hybridization, fingerprinting and sequence data. New markers were generated from BAC end sequences to close the gap. After several rounds of hybridization positive BACs were assembled into 7 contigs covering approximately 20 Mb. Thirty of the polymorphic markers used in linkage were assigned to four of the contigs. Estimation of contig lengths and distance between markers assigned to them was based on the FPC program.

[0202] Twenty-seven of our 30 linkage markers mapped to three contigs in the October 2000 release from UCSC, the UC Santa Cruz (UCSC) draft assembly. (http://genome.ucsc.edu/). The marker order within the contigs is in agreement with our order with the exception of two markers. Although the UCSC assemblies are improving, some contigs have incorrect order, orientation, or contig assembly. We believe that high resolution genetic mapping and perhaps focused hybridization experiments are still necessary to confirm accuracy of sequence assemblies. In addition, high resolution genetic mapping provides better estimates of inter-marker genetic distances that are also important for linkage analysis (Halpern, J. and Whittermore, A. S., Hum. Hered. 49:194 (1999); Daw, E. W., et al., Genet. Epidemiol. 19:366 (2000)).

Statistical Methods for Linkage Analysis

[0203] Multipoint, affected-only allele-sharing methods were used in the analyses to assess evidence for linkage. All results, both the LOD-score and the non-parametric linkage (NPL) score, were obtained using the program Allegro (Gudbjartsson et al., Nat. Genet. 25:12-3, 2000). Our baseline linkage analysis, as previously described (Gretarsdottir et al., Am J Hom Genet, 70:593-603, 2002), uses the Sₚₐᵢᵣₛ scoring function (Whittemore, A. S., Halpern, J. (1994), Biometrics 50:118-27; Kruglyak L, et al. (1996), Am J Hum Genet 58:1347-63), the exponential allele-sharing model (Kong, A. and Cox, N. J. (1997), Am J Hum Genet 61:1179-88) and a family weighting scheme that is halfway, on the log-scale, between weighting each affected pair equally and weighting each family equally. The information measure we use is part of the Allegro program output and the information value equals zero if the marker genotypes are completely uninformative and equals one if the genotypes determine the exact amount of allele sharing by decent among the affected relatives (Gretarsdottir et al., Am. J. Hom. Genet, 70:593-603, (2002)). We computed the P-values two different ways and here report the less significant result. The first P-value was computed on the basis of large sample theory; the distribution of Zᵢᵣ=√(2[logₑ(10)LOD]) approximates a standard normal variable under the null hypothesis of no linkage (Kong, A. and Cox, N. J. (1997), Am J Hum Genet 61:1179-88). The second P-value was calculated by comparing the observed LOD-score with its complete data sampling distribution under the null hypothesis (Gudbjartsson et al., Nat. Genet. 25:12-3, 2000). When the data consist of more than a few families, as is the case here, these two P-values tend to be very similar.

Final Linkage Results and Localization

[0204] Linkage analysis including genotypes from the higher density markers using the deCODE marker order resulted in a lod score of 4.40 (P=3.9×10⁻⁶) on chromosome 5q12 at the marker D5S2080. The reported P value is part of the output of the ALLEGRO (deCODE genetics) program which was developed at deCODE and has become a standard linkage program worldwide over the last 3 years (Gudbjartsson et al., Nat. Genet. 25:12-3, 2000). We have given it to over 200 academic departments around the world free of charge and it is widely used. The locus has been designated as STRK1. With the addition of these extra markers, it was possible to narrow down the region to a segment less than 6 cM, from D5S1474 to D5S398, as defined by one drop in lod.

[0205] To further investigate the contribution of this susceptibility locus to stroke, a range of parametric models were fitted to the data. However, all analyses were still affecteds only in the sense that individuals were either classified as affecteds or having unknown disease status. A lod score of 4.08 was obtained with a dominant model where the allele frequency of the susceptibility gene was assumed to be 5% and carriers of the alteration were assumed to have seven-fold the risk of a non-carrier. By inspecting the individual families, no obvious correlation was seen between families that contribute positively to the linkage results with the prevalence of hypertension, diabetes or hyperlipidemias. When the data were reanalyzed with the hemorrhagic stroke patients removed, the allele sharing lod score increased to 4.86 at D5S2080. Although this 0.46 increase in log score suggests that STRK1 is involved primarily in ischemic stroke and TIAs, it is not statistically significant based on simulations (one sided P equals 0.09). In order to assess whether such a change in lod score would be likely to occur by chance we selected 1000 random sets of 22 patients whose status we then changed to “unknown” in an analysis. The P value we present is the fraction of the 1000 simulations which produce a lod score increase at the peak locus equal to or greater than that which we observed by changing the affection status of the 22 hemorrhagic stroke patients to “unknown”.

Identification of Allelic Association

[0206] All microsatellite markers in the approx. 6 cM interval (markers from D5S398 to D5S1474) were analyzed with respect to allelic association.

Microsatellite Allelic Association

[0207] We initially genotyped 864 Icelandic stroke patients and 908 controls using a total of 98 microsatellite markers. These markers are distributed over a region of approximately 11 Mb. The region is centered on our linkage peak and corresponds to the 2 LOD drop. The density of markers is greater in the central 3.7 Mb portion of the region, which includes the 1 LOD drop, with an average spacing of one marker every 53 kb. We have designated this central region, which is flanked by markers D5S 1474 and D5S398, as the STRK1 interval. Three markers, AC027322-5, D5S2121 and AC008818-1, showed a difference in allelic frequency between patients and controls with p-values less than 0.01 (Table 1). Correcting for the relatedness of the Icelandic patients had little impact on the p-values, but after correcting for the number of markers and alleles tested none of these p-values were significant (Table 1).

[0208] We had previously observed that our linkage peak increased, albeit not significantly, when excluding the hemorrhagic stroke patients. We therefore tested only those patients with ischemic stroke or TIA for association to the markers. In addition, our ischemic stroke and TIA patients have been sub-classified according to the TOAST research criteria and we also repeated the association analysis separately for patients with the three TOAST subcategories: cardiogenic, carotid (greater than 70% stenosis) and small vessel occlusive disease. Lastly, we tested the combination of patients with cardiogenic and carotid stroke, since these categories of stroke are most clearly related to atherosclerosis. The results for each of these association studies are presented in Table 1. Three of the tests, one for cardiogenic stroke (AC008818-1), one for carotid stroke (DG5S397), and one for the combination of carotid and cardiogenic stroke (AC008818-1) were significant even after correcting for multiple testing (Table 1). The marker DG5S397 is located within the PDE4D gene and AC008818-1 is in the 5′ end of PDE4D and in the overlapping gene Prostate androgen-regulated transcript (PART1) whose transcript is on the other strand going in the opposite direction. PDE4D is an important regulator of intracellular levels of cAMP and is expressed widely. PART1 encodes a putative protein with unknown function predominantly expressed in the prostate gland and in several cancer cell lines. Physical locations of all genotyped markers and PDE4D and PART1 exons are available in Table 2C. The association results for the combination of carotid and cardiogenic stroke were particularly striking with an allele frequency of 35.5% in patients for allele 0 (the CEPH reference allele) of marker AC008818-1 versus 25.5% in controls. The unadjusted p-value for this marker is 0.0000015, and after adjusting for multiple testing of markers is 0.00025 (Table 1). This remains significant even after adjusting for the several phenotypes studied. The risk of this allele to the other alleles of this marker, assuming the multiplicative model Terwilliger, J. D. & Ott, J. A haplotype-based ‘haplotype relative risk’ approach to detecting allelic associations. Hum Hered 42, 337-46 (1992) and Falk, C. T. & Rubinstein, P. Haplotype relative risks: an easy reliable way to construct a proper control sample for risk calculations. Ann Hum Genet 51 (Pt 3), 227-33 (1987), was estimated to be 1.60, and the corresponding population attributable risk was 25%.

[0209] Thus, the strong association signals from our initial microsatellite association studies helped to focus our attention on the STRK1 interval and, in particular, to the PDE4D gene region.

TABLE 1
Microsatellite allelic association analysis of the two-lod drop of the STRK1 locus.
All microsatellites that show association with a p-value less than 0.01 for all stroke, all stroke
excluding hemorrhagic stroke, cardiogenic stroke, carotid stroke, small vessel disease and the
combination of cardio genic and carotid stroke *significant after adjusting for multiple testing

| Phenotype | Marker | Allele | p-value | RR | # Aff. | Aff. % | # Ctrl | Ctrl. % |
|---|---|---|---|---|---|---|---|---|
| All | AC027322-5 | 10 | 0.001 | 3.34 | 787 | 1.90 | 779 | 0.6 |
| | D5S2121 | −2 | 0.0027 | 2.19 | 824 | 2.7 | 870 | 1.3 |
| | AC008818-1 | 0 | 0.0045 | 1.25 | 815 | 29.9 | 891 | 25.5 |
| All patients - | AC027322-5 | 10 | 0.00052 | 3.56 | 740 | 20 | 779 | 0.6 |
| excluding | D5S2121 | −2 | 0.0023 | 2.23 | 774 | 2.8 | 870 | 1.3 |
| hemorrhagic | AC008818-1 | 0 | 0.0062 | 1.24 | 764 | 29.9 | 891 | 25.5 |
| stroke | | | | | | | | |
| Cardiogenic | AC008818-1 | 0 | 0.000054* | 1.60 | 216 | 35.4 | 891 | 25.5 |
| stroke | D5S1990 | 20 | 0.00053 | 2.18 | 223 | 7.9 | 879 | 3.8 |
| | D5S2089 | −10 | 0.0027 | 2.22 | 219 | 5.9 | 813 | 2.8 |
| | D5S1359 | 2 | 0.0044 | 1.39 | 214 | 36.0 | 777 | 28.8 |
| | AC016604-2 | 0 | 0.0048 | 1.44 | 170 | 51.8 | 446 | 42.7 |
| | AC008804-1 | 0 | 0.0068 | 1.52 | 128 | 36.3 | 367 | 27.3 |
| | AC022125-3 | 0 | 0.0077 | 1.36 | 223 | 36.8 | 775 | 30.0 |
| | DG5S2066 | 0 | 0.0095 | 1.80 | 166 | 92.5 | 501 | 87.2 |
| | DG5S2039 | 9 | 0.0084 | 2.00 | 167 | 8.7 | 491 | 4.6 |
| | D5S647 | −6 | 0.0091 | 2.43 | 199 | 3.8 | 789 | 1.6 |
| Carotid stroke | DG5S397 | 4 | 0.00024* | 1.70 | 124 | 65.7 | 577 | 53.0 |
| | DG5S2056 | 12 | 0.0009 | 3.33 | 80 | 8.8 | 464 | 2.8 |
| | AC008818-1 | 0 | 0.001 | 1.61 | 125 | 35.6 | 891 | 25.5 |
| | DG5S2039 | −3 | 0.003 | 1.62 | 96 | 45.8 | 491 | 34.3 |
| | DG5S2045 | 0 | 0.0051 | 1.80 | 55 | 57.3 | 339 | 42.6 |
| | DG5S818 | 6 | 0.0079 | 1.50 | 111 | 63.1 | 563 | 53.3 |
| | AC016604-3 | 4 | 0.0072 | 1.53 | 99 | 40.9 | 645 | 31.2 |
| Small vessel | D5S1359 | 2 | 0.0085 | 1.41 | 157 | 36.3 | 777 | 28.8 |
| disease | D5S2080 | 2 | 0.0092 | 1.38 | 153 | 54.6 | 885 | 46.5 |
| | D5S2121 | −2 | 0.0059 | 2.93 | 152 | 3.6 | 870 | 1.3 |
| Combined | AC008818-1 | 0 | 0.0000015* | 1.60 | 341 | 35.5 | 891 | 25.5 |
| cardiogenic & | AC008833-6 | 0 | 0.0026 | 1.35 | 335 | 70.3 | 868 | 63.8 |
| carotid stroke | DG5S2066 | 0 | 0.0032 | 1.74 | 258 | 92.3 | 501 | 87.2 |
| | DG5S397 | 4 | 0.009 | 1.29 | 345 | 59.3 | 577 | 53.0 |
| | D5S2121 | −2 | 0.0081 | 2.39 | 336 | 3.0 | 870 | 1.3 |
| Alleles #'s: For SNP alleles A = 0, C = 1, G = 2, T = 3; for microsatellite alleles: the CEPH sample 1347-02 (CEPH genomics repository) is used as a reference, the lower allele of each microsatellite in this sample is set at 0 and all other alleles in other samples are numbered | | | | | | | | |
| # accordingly in relation to this reference. Thus allele 1 is 1 bp longer than the lower allele in the CEPH sample 1347-02, allele 2 is 2 bp longer than the lower allele in the CEPH sample 1347- 02, allele 3 is 3 bp longer than the lower allele in the CEPH sample 1347-02, allele 4 is 4 bp | | | | | | | | |
| # longer than the lower allele in the CEPH sample 1347-02, allele −1 is 1 bp shorter than the lower allele in the CEPH sample 1347-02, allele −2 is 2 bp shorter than the lower allele in the EPH sample 1347-02, and so on. Note that this same CEPH sample is a standard that is widely used | | | | | | | | |
| # throughout the world for calibration and comparison of alleles. | | | | | | | | |

[0210] AC008818-1 amplimer:

(SEQ ID NO: 86)

TGCTTGGTGAAGGAATAGCCACCCCAGAGAAGGAGTATGGACTTCTATAC
ACAATCATTCATTCATTCATTCATTCATTCATTCATTCATTCATTCACTA
CTCATGCATGATCTTTGTCCTTATCTTCCTCCACTGTCACATGAATACCC
ACCCACTGCACCTACCTGCTTCCTATTCCTGAGAACCCAGGCTC

[0211] AC008818-1, allele 0 is the same allele as the minimum allele observed in CEPH 1347-02, family 137, individual 02.

[0212] Swedish patients have also been genotyped and microsatellite single and multimarker association has been analyzed using the E-M algorithm. A total number of 943 Swedish patients (stroke patients and patients with carotid stenosis) and 322 Swedish controls were analyzed (results shown in Table 2A). At least three haplotypes were more common in patients compared to controls, confirming in a second population that PDE4D shows association to stroke.

TABLE 2A
Swedish Patient Association

| Markers | Alleles | pAllelic | All Frq Aff | All Frq Ctrl | # aff | # ctrl |
|---|---|---|---|---|---|---|
| Swedish patients (n = 943) | | | | | | |
| D5S2000 | 2 | 0.0024 | | | 912 | 318 |
| (Sw 2) AC022125-3 | 0 0 2 0 | 0.006 | 0.035 | 0.01 | 717 | 284 |
| AC008833-6 D5S2000 D5S2091 | | | | | | |
| (Sw-1) AC008804-2 D17-H | −2 4 −2 10 | 0.0028 | 0.057 | 0.05 | 672 | 113 |
| D17-G D5S2080 | | | | | | |
| AC008804-2 D17-H D17-G | −4 0 −2 | 0.0037 | 0.056 | 0.03 | 700 | 123 |

Screening for Polymorphisms in PDE4D

[0213] We next considered whether a functional variant in the PDE4D gene might be the cause of our observed microsatellite association. We matched public domain ESTs and our own RT-PCR and RACE transcripts to our sequence of the STRK1 interval. We defined new alternative PDE4D transcripts, which together with previously known transcripts indicated that the PDE4D gene contains 22 exons over at least 1.5 Mb and overlaps with PART1. The PDE4D gene encodes eight protein isoforms and has at least seven promoters. All isoforms identified have an identical C-terminal catalytic domain but differ at the N-terminal regulatory domain (FIG. 2).

[0214] We then attempted to identify mutations by sequencing all known PDE4D exons (including the overlapping PART1 exons) and, on average, 100 bp of their flanking introns in 188 patients and 94 controls. Forty-six polymorphisms were identified; 44 SNPs and two intronic deletions. Only two of the polymorphisms, both SNPs, were found within the coding exons of the PDE4D gene, which is consistent with the extraordinary lack of variation that others have reported for all four PDE4 classes Houslay, M. D. & Adams, D. R. PDE4 cAMP phosphodiesterases: modular enzymes that orchestrate signalling cross-talk, desensitization and compartmentalization. Biochem J 370, 1-18 (2003). The two coding SNPs were typed for additional patients and controls. However, these SNPs did not show significant association to stroke (Table 2B). Therefore, if a functional variant conferring risk for stroke exists in the PDE4D gene, it may be within regulatory regions affecting transcription, splicing, message stability, or message transport of one or more isoforms, or in exons that we have not yet identified.

TABLE 2B
Frequency of PDE4D coding mutations.

| | AA | PDE4D | | p- | Aff. | Ctrl. | | |
|---|---|---|---|---|---|---|---|---|
| Markers | change | exon | Allele | value | % | % | # Aff | # Ctrl |
| SNP | Pro > | D1/D2 | A | 0.163 | 2.0 | 1.5 | 604 | 369 |
| 250 | Thr | | | | | | | |
| SNP | Lys > | 4 | C | 0.381 | 0.2 | 0.0 | 474 | 294 |
| 257 | Thr | | | | | | | |

PDE4D Isoform Expression

[0215] Failing to find a functional mutation in the known coding exons of PDE4D, we were interested to consider other possible evidence in favor of this gene being a source of the underlying association in this region. We conducted an experiment to study the expression levels of the various isoforms—with any significant differences between patients and controls potentially indicating that regulation of PDE4D is a key element in stroke susceptibility. We used EBV transformed B cell lines from randomly selected patients having ischemic stroke or TIA and from controls. We carried out isoform-specific kinetic RT-PCR analysis to quantify each isoform in 83 stroke patients and 84 controls. The patients were principally ischemic stroke patients, with 32 of them having cardiogenic or carotid stroke. We observed that the total PDE4D message level, as assessed by amplification across exons present in all isoforms (PAN), was significantly lower in patients than in controls (p-value=0.0021). This decrease was due primarily to lower expression of the PDE4D1, PDE4D2 and PDE4D5 isoforms. This significant disregulation of the expression of multiple PDE4D isoforms greatly encouraged us to continue our investigations into the association of the PDE4D gene to stroke.

TABLE 2C
SNP identification, single marker association and LD mapping of the PDE4D
region

| SNP | | Public | start in NCBI | end in NCBI | start in SEQ | end in SEQ |
|---|---|---|---|---|---|---|
| code | marker or exon | name | build 31 | build 33 | ID NO: 1 | ID NO: 1 |
| | AC016604 - 3 | | 57547045 | 57547304 | | |
| | AC016604 - 2 | | 57623148 | 57623287 | | |
| | exon 11 | | 58241020 | 58241432 | 1655335 | 1655747 |
| | exon 10 | | 58242009 | 58242191 | 1654576 | 1654758 |
| | exon 9 | | 58242702 | 58242824 | 1653943 | 1654065 |
| | exon 8 | | 58243543 | 58243697 | 1653070 | 1653224 |
| | exon 7 | | 58254845 | 58254944 | 1641818 | 1641917 |
| | exon 6 | | 58256107 | 58256271 | 1640491 | 1640655 |
| | exon 5 | | 58257156 | 58257254 | 1639508 | 1639606 |
| | exon 4 | | 58258185 | 58258356 | 1638406 | 1638578 |
| | exon 3 | | 58259724 | 58259817 | 1636944 | 1637037 |
| | exon D1/D2 | | 58305211 | 58305581 | 1591172 | 1591425 |
| | exon LF4 | | 58446946 | 58446995 | 1449835 | 1449884 |
| | exon LF3 | | 58451540 | 58451613 | 1445217 | 1445290 |
| | exon LF2 | | 58459851 | 58459887 | 1436943 | 1436979 |
| | exon LF1 | | 58482128 | 58482319 | 1414511 | 1414702 |
| | AC022125 - 3 | | 58504109 | 58504274 | 1392556 | 1392721 |
| SNP 204 | SNP5PD890407 | | 58506423 | 58506423 | 1390407 | 1390407 |
| | AC008833 - 6 | | 58507019 | 58507222 | 1389608 | 1389811 |
| | exon D9 | | 58541689 | 58542470 | 1354347 | 1355128 |
| | D5S2000 | | 58585460 | 58585849 | | |
| | D5S2091 | | 58593284 | 58593634 | | |
| | exon D8 | | 58623109 | 58623414 | 1273404 | 1273709 |
| | D17 - C | | 58645088 | 58645386 | 1251432 | 1251730 |
| | AC008804 - 1 | | 58784449 | 58784641 | 1112181 | 1112373 |
| | AC008804 - 2 | | 58817743 | 58817931 | 1078881 | 1079069 |
| | exon D3 | | 58852680 | 58852819 | 1044051 | 1044190 |
| | D17 - H | | 58860588 | 58860725 | 1036142 | 1036279 |
| | D17 - G | | 58942270 | 58942541 | 954298 | 954569 |
| | D5S2080 | | 58998685 | 58999021 | | |
| | exon D5 | | 59034598 | 59035009 | 861791 | 862202 |
| | AC027322 - 5 | | 59159221 | 59159326 | 737420 | 737519 |
| | exon D4 | | 59159520 | 59160492 | 736254 | 737226 |
| SNP 102 | SNP5PD166822 | rs714291 | 59229897 | 59229897 | | |
| | exon D7 - 3 | | 59254840 | 59255069 | 641649 | 641878 |
| SNP 101 | SNP5PD138604 | rs1347401 | 59258113 | 59258113 | 638605 | 638605 |
| SNP 100 | SNP5PD121753 | rs1545070 | 59274962 | 59274962 | | |
| SNP 99 | SNP5PD118378 | rs1533019 | 59278338 | 59278338 | | |
| SNP 98 | SNP5PD117029 | rs952110 | 59279687 | 59279687 | | |
| SNP 97 | SNP5PD104361 | rs1995780 | 59292356 | 59292356 | | |
| SNP 96 | SNP5PD97409 | | 59299308 | 59299308 | | |
| SNP 95 | SNP5PD97281 | rs2016324 | 59299437 | 59299437 | | |
| SNP 94 | SNP5PD75406 | rs1396474 | 59321313 | 59321313 | | |
| SNP 93 | SNP5PD73383 | rs1508864 | 59323336 | 59323336 | | |
| SNP 92 | SNP5PD72097 | rs1508859 | 59324622 | 59324622 | | |
| | DG5S2045 | | 59325313 | 59325563 | 571152 | 571406 |
| | DG5S2039 | | 59332799 | 59333077 | 563636 | 563921 |
| SNP 91 | SNP5PD46864 | rs1508863 | 59349851 | 59349851 | | |
| SNP 90 | SNP5PD43868 | rs2136203 | 59352849 | 59352849 | | |
| SNP 89 | SNP5PD29517 | rs1396476 | 59367167 | 59367167 | | |
| | DG5S2056 | | 59381102 | 59381367 | 515317 | 515582 |
| | DG5S818 | | 59384776 | 59384999 | 511685 | 511908 |
| SNP 88 | SNP5PDM14337 | rs1544788 | 59411021 | 59411021 | | |
| | DG5S397 | | 59438506 | 59438784 | 457900 | 458178 |
| SNP 87 | SNP5PDM43741 | rs2910829 | 59440424 | 59440424 | | |
| | exon D7 - 2 | | 59451909 | 59452039 | 444645 | 444775 |
| SNP 86 | SNP5PDM57997 | rs2962972 | 59454680 | 59454680 | | |
| SNP 85 | SNP5PDM65461 | rs2961897 | 59462144 | 59462144 | | |
| SNP 84 | SNP5PDM67604 | rs719702 | 59464287 | 59464287 | | |
| SNP 83 | SNP5PDM76361 | rs966221 | 59473045 | 59473045 | | |
| SNP 82 | SNP5PDM83539 | rs2961903 | 59480223 | 59480223 | | |
| SNP 81 | SNP5PDM89176 | | 59485859 | 59485859 | 410826 | 410826 |
| SNP 80 | SNP5PDM89683 | rs1862614 | 59486368 | 59486368 | | |
| | DG5S2066 | | 59522085 | 59522346 | 374339 | 374600 |
| SNP 79 | SNP5PDM132154 | | 59528838 | 59528838 | 367847 | 367847 |
| SNP 78 | SNP5PDM153120 | | 59549804 | 59549804 | 346881 | 346881 |
| SNP 77 | SNP5PDM161561 | | 59558245 | 59558245 | 338440 | 338440 |
| SNP 76 | SNP5PDM166786 | | 59563470 | 59563470 | 333215 | 333215 |
| SNP 75 | SNP5PDM181173 | | 59577856 | 59577856 | 318829 | 318829 |
| SNP 74 | SNP5PDM182792 | | 59579475 | 59579475 | 317210 | 317210 |
| SNP 73 | SNP5PDM211974 | | 59608650 | 59608650 | 288027 | 288027 |
| SNP 72 | SNP5PDM217886 | | 59614557 | 59614557 | 282115 | 282115 |
| SNP 71 | SNP5PDM218639 | | 59615310 | 59615310 | 281362 | 281362 |
| SNP 70 | SNP5PDM224528 | | 59621190 | 59621190 | 275473 | 275473 |
| SNP 69 | SNP5PDM236461 | rs1423248 | 59633124 | 59633124 | | |
| SNP 68 | SNP5PDM259844 | | 59656504 | 59656504 | 240157 | 240157 |
| SNP 67 | SNP5PDM261488 | | 59658148 | 59658148 | 238513 | 238513 |
| SNP 66 | SNP5PDM265669 | | 59662328 | 59662328 | 234332 | 234332 |
| SNP 65 | SNP5PDM271674 | rs918590 | 59668333 | 59668333 | | |
| SNP 64 | SNP5PDM275805 | rs1423247 | 59672463 | 59672463 | | |
| SNP 63 | SNP5PDM280894 | rs789389 | 59677551 | 59677551 | | |
| SNP 62 | SNP5PDM285592 | | 59682247 | 59682247 | 214409 | 214409 |
| SNP 61 | SNP5PDM296955 | rs37691 | 59693610 | 59693610 | | |
| SNP 60 | SNP5PDM299842 | | 59696497 | 59696497 | 200159 | 200159 |
| SNP 59 | SNP5PDM307243 | rs37684 | 59703890 | 59703890 | | |
| SNP 58 | SNP5PDM308509 | rs2898278 | 59705155 | 59705155 | | |
| SNP 57 | SNP5PDM310220 | rs401207 | 59706866 | 59706866 | | |
| SNP 56 | SNP5PDM310653 | rs702553 | 59707298 | 59707298 | | |
| SNP 55 | SNP5PDM324741 | rs251726 | 59721387 | 59721387 | | |
| SNP 54 | SNP5PDM326519 | rs27223 | 59723165 | 59723165 | | |
| SNP 53 | SNP5PDM329913 | | 59726556 | 59726556 | 170088 | 170088 |
| SNP 52 | SNP5PDM332989 | | 59729632 | 59729632 | 166900 | 166900 |
| SNP 51 | SNP5PDM338487 | | 59735122 | 59735122 | 161514 | 161514 |
| SNP 50 | SNP5PDM345627 | rs173591 | 59742248 | 59742248 | | |
| SNP 49 | SNP5PDM349039 | rs27220 | 59745661 | 59745661 | | |
| SNP 48 | SNP5PDM351840 | rs37760 | 59748461 | 59748461 | | |
| SNP 47 | SNP5PDM356081 | | 59752701 | 59752701 | 143922 | 143922 |
| SNP 46 | SNP5PDM356447 | | 59753067 | 59753067 | 143555 | 143555 |
| SNP 45 | SNP5PDM357221 | | 59753842 | 59753842 | 142780 | 142780 |
| SNP 44 | SNP5PDM357245 | | 59753865 | 59753865 | 142757 | 142757 |
| SNP 43 | SNP5PDM357445 | | 59754066 | 59754066 | 142556 | 142556 |
| | PART1-exon 1 | | 59754284 | 59754775 | | |
| | exon D7-1 | | 59754294 | 59754415 | 142207 | 142328 |
| | PART1-exon 2 | | 59756013 | 59757617 | | |
| SNP 42 | SNP5PDM361194 | rs153031 | 59757816 | 59757816 | | |
| SNP 41 | SNP5PDM361545 | | 59758341 | 59758341 | 138456 | 138456 |
| | AC008818-1 | SEQ ID | 59759882 | 59760075 | 136740 | 136547 |
| | | NO: 86 | | | | |
| SNP 40 | SNP5PDM363736 | | 59760357 | 59760357 | 136265 | 136265 |
| SNP 39 | SNP5PDM364360 | rs3887175 | 59760981 | 59760981 | | |
| SNP 38 | SNP5PDM364848 | | 59761469 | 59761469 | 135152 | 135152 |
| SNP 37 | SNP5PDM364888 | rs26956 | 59761510 | 59761510 | 135112 | 135112 |
| SNP 36 | SNP5PDM366629 | | 59763250 | 59763250 | 133371 | 133371 |
| SNP 35 | SNP5PDM367438 | rs26955 | 59764060 | 59764060 | 132562 | 132562 |
| SNP 34 | SNP5PDM368135 | rs27653 | 59764755 | 59764755 | 131865 | 131865 |
| SNP 33 | SNP5PDM369610 | | 59766229 | 59766229 | 130391 | 130391 |
| SNP 32 | SNP5PDM370640 | | 59767259 | 59767259 | 129361 | 129361 |
| SNP 31 | SNP5PDM370641 | rs457053 | 59767260 | 59767261 | 129360 | 129360 |
| SNP 30 | SNP5PDM374696 | rs27221 | 59771316 | 59771316 | 125304 | 125304 |
| SNP 29 | SNP5PDM376181 | rs2963110 | 59772800 | 59772800 | | |
| SNP 28 | SNP5PDM376575 | rs35387 | 59773194 | 59773194 | 123426 | 123426 |
| SNP 27 | SNP5PDM376688 | rs35386 | 59773308 | 59773308 | 123312 | 123312 |
| SNP 26 | SNP5PDM379372 | rs40512 | 59775992 | 59775992 | 120628 | 120628 |
| SNP 25 | SNP5PDM380376 | | 59776995 | 59776995 | | |
| SNP 24 | SNP5PDM381086 | rs35385 | 59777706 | 59777706 | 118914 | 118914 |
| SNP 23 | SNP5PDM388220 | rs26953 | 59784839 | 59784839 | 111781 | 111781 |
| SNP 22 | SNP5PDM388748 | | 59785368 | 59785368 | 111252 | 111252 |
| SNP 21 | SNP5PDM388749 | rs26954 | 59785369 | 59785370 | | |
| SNP 20 | SNP5PDM390700 | | 59787319 | 59787319 | 109301 | 109301 |
| SNP 19 | SNP5PDM392152 | rs4133470 | 59788771 | 59788771 | 107849 | 107849 |
| SNP 18 | SNP5PDM392684 | | 59789302 | 59789302 | 107317 | 107317 |
| SNP 17 | SNP5PDM394085 | | 59790704 | 59790704 | 105792 | 105792 |
| SNP 16 | SNP5PDM394776 | rs35384 | 59791395 | 59791395 | 105225 | 105225 |
| SNP 15 | SNP5PDM395449 | rs35382 | 59792068 | 59792068 | 104552 | 104552 |
| SNP 14 | SNP5PDM397023 | rs26950 | 59793643 | 59793643 | 102977 | 102977 |
| SNP 13 | SNP5PDM399206 | rs26949 | 59795825 | 59795825 | 100795 | 100795 |
| SNP 12 | SNP5PDM400966 | rs153153 | 59797585 | 59797585 | 99035 | 99035 |
| SNP 11 | SNP5PDM402736 | rs152340 | 59799349 | 59799349 | | |
| SNP 10 | SNP5PDM407853 | | 59804468 | 59804468 | 92148 | 92148 |
| SNP 9 | SNP5PDM408531 | | 59805145 | 59805145 | 91470 | 91470 |
| SNP 8 | SNP5PDM408979 | | 59805593 | 59805593 | 91022 | 91022 |
| SNP 7 | SNP5PDM409460 | | 59806074 | 59806074 | 90541 | 90541 |
| SNP 6 | SNP5PDM411387 | | 59808001 | 59808001 | 88614 | 88614 |
| SNP 5 | SNP5PDM411544 | rs27564 | 59808159 | 59808159 | 88456 | 88456 |
| SNP 4 | SNP5PDM416882 | rs153152 | 59813496 | 59813496 | 83119 | 83119 |
| SNP 3 | SNP5PDM417756 | rs187481 | 59814371 | 59814371 | 82244 | 82244 |
| SNP 2 | SNP5PDM419874 | rs152341 | 59816488 | 59816488 | 80127 | 80127 |
| SNP 1 | SNP5PDM421449 | rs248911 | 59818063 | 59818063 | 78552 | 78552 |
| | D5S1990 | | 60945599 | 60945816 | | |
| | D5S1359 | | 63542603 | 63542894 | | |
| | D5S2089 | | 65914315 | 65914496 | | |
| | D5S647 | | 66217674 | 66218065 | | |
| | D5S2121 | | 66584091 | 66584385 | | |

[0216] We next searched for SNPs in the intronic and flanking regions of PDE4D. The SNPs were identified in the public NCBI SNP database or by sequencing selected intronic and flanking regions in the gene in at least 94 patients and 94 controls. We initially identified 637 SNPS. Many of these SNPs were completely correlated so we removed many redundant SNPs from further genotyping. Some SNPs with very low minor allele frequencies were also ignored. This resulted in a set of 260 SNPs that were then genotyped for the entire patient and control cohorts. The preponderance of markers with significant associations was located at the 5′ end of the gene. One SNP (SNP5PDM76361; SNP83) for carotid stroke and five of the SNPs (SNP5PDM357221=SNP45, SNP5PDM361545=SNP41, SNP5PDM43741=SNP87, SNP5PDM29517=SNP89 and SNP5PDMSNP56) for the combined cardiogenic and carotid stroke remained significant even after adjusting for all the SNPs tested (Table 2D). Three of these significant SNPs flank exon D7-1; the other three are in a 100 kb region containing exon D7-2 (for physical positions see Table 2D). The two most significant SNPs, SNP45 and SNP41, are within 6 kb of the microsatellite marker AC008818-1, and the at-risk alleles of all three genetic markers are in strong linkage disequilibrium with D′>0.9 and p-value nearly zero. The square of the correlation (R²) is very high between the two SNPs (˜0.93), but is substantially lower (˜0.08) between each SNP and the at-risk allele of the microsatellite. This is due to the fact that the frequency of the at-risk alleles of the two SNPs are similar, and much more frequent than that for the at-risk allele of the microsatellite. The LD block structure around the 5′ end of PDE4D is displayed in FIG. 13.1. We delineate three blocks A, B and C encompassing the first three exons of PDE4D and its immediate downstream region. Exons D7-3 and D7-2 are both in block A, while D7-1 (the first exon) is in block B, but close to its border with block C. Given this block structure we were prepared to investigate the haplotype associated susceptibility to stroke in this region. Table 2D. All SNPs that show association with a p-value less than 0.01 for all stroke patients, all patients excluding hemorrhagic stroke and the combined cardiogenic and carotid stroke.

| Phenotype | Marker | Allele | p-value | RR | # Affect | Aff. % | # Ctrl | Ctrl. % |
|---|---|---|---|---|---|---|---|---|
| All patients | SNP 32 | C | 0.00024 | 1.46 | 400 | 37.9 | 475 | 29.5 |
| | SNP 56 | T | 0.0028 | 1.31 | 550 | 71.4 | 615 | 65.5 |
| | SNP 45 | G | 0.0065 | 1.33 | 723 | 82.4 | 492 | 78.0 |
| | SNP 48 | T | 0.0091 | 1.28 | 547 | 68.3 | 481 | 62.8 |
| All patients | SNP 32 | C | 0.00034 | 1.45 | 377 | 37.8 | 475 | 29.5 |
| excl. | SNP 56 | T | 0.0066 | 1.28 | 518 | 70.9 | 615 | 65.5 |
| hemorrhagic | SNP 45 | G | 0.0095 | 1.31 | 679 | 82.3 | 492 | 78.0 |
| stroke | | | | | | | | |
| Combined | SNP 45 | G | 0.000034* | 1.77 | 309 | 86.3 | 492 | 78.0 |
| cardiogenic & | SNP 41 | A | 0.000078* | 1.86 | 236 | 86.0 | 368 | 76.8 |
| carotid | SNP 87 | T | 0.00019* | 1.49 | 263 | 58.2 | 583 | 48.4 |
| | SNP 89 | A | 0.00025* | 1.84 | 232 | 88.8 | 450 | 81.1 |
| | SNP 56 | T | 0.00027* | 1.56 | 230 | 74.8 | 615 | 65.5 |
| | SNP 39 | T | 0.00032 | 1.58 | 326 | 84.4 | 589 | 77.3 |
| | SNP 91 | G | 0.00047 | 1.80 | 233 | 88.6 | 451 | 81.3 |
| | SNP 32 | C | 0.00069 | 1.61 | 144 | 40.3 | 475 | 29.5 |
| | SNP 62 | A | 0.00089 | 1.73 | 153 | 83.0 | 556 | 73.8 |
| | SNP 48 | T | 0.00080 | 1.51 | 229 | 71.8 | 481 | 62.8 |
| | SNP 42 | A | 0.0018 | 1.49 | 259 | 72.0 | 403 | 63.6 |
| | SNP 184 | G | 0.0025 | 1.68 | 252 | 90.7 | 570 | 85.3 |
| | SNP 58 | T | 0.0042 | 1.54 | 234 | 85.3 | 569 | 79.0 |
| | SNP 53 | C | 0.0041 | 1.58 | 146 | 36.0 | 269 | 26.2 |
| | SNP 97 | G | 0.0046 | 1.40 | 225 | 54.2 | 450 | 45.9 |
| | SNP 204 | A | 0.0049 | 1.32 | 334 | 63.9 | 651 | 57.3 |
| | SNP 8 | A | 0.0054 | 1.59 | 228 | 89.0 | 612 | 83.7 |
| | SNP 83 | C | 0.0074 | 1.39 | 223 | 60.1 | 349 | 52.0 |
| | SNP 43 | T | 0.0093 | 1.48 | 243 | 85.4 | 550 | 79.8 |

*significant after adjusting for multiple testing

Haplotype Analysis

[0217] Our general approach to haplotype analysis involves using likelihood-based inference applied to NEsted MOdels. The method is implemented in our program NEMO, which allows for many polymorphic markers, SNPs and microsatellites. The method and software are specifically designed for case-control studies where the purpose is to identify haplotype groups that confer different risks. It is also a tool for studying LD structures.

[0218] When investigating haplotypes constructed from many markers, apart from looking at each haplotype individually, meaningful summaries often require putting haplotypes into groups. A particular partition of the haplotype space is a model that assumes haplotypes within a group have the same risk, while haplotypes in different groups can have different risks. Two models/partitions are nested when one, the alternative model, is a finer partition compared to the other, the null model, i.e, the alternative model allows some haplotypes assumed to have the same risk in the null model to have different risks. The models are nested in the classical sense that the null model is a special case of the alternative model. Hence traditional generalized likelihood ratio tests can be used to test the null model against the alternative model. Note that, with a multiplicative model, if haplotypes hᵢ and hⱼ are assumed to have the same risk, it corresponds to assuming that fᵢ/pᵢ=fⱼ/pⱼ where f and p denote haplotype frequencies in the affected population and the control population respectively.

[0219] One common way to handle uncertainty in phase and missing genotypes is a two-step method of first estimating haplotype counts and then treating the estimated counts as the exact counts, a method that can sometimes be problematic (e.g., see the information measure section below) and may require randomization to properly evaluate statistical significance. In NEMO, maximum likelihood estimates, likelihood ratios and p-values are calculated directly, with the aid of the EM algorithm, for the observed data treating it as a missing-data problem.

[0220] NEMO allows complete flexibility for partitions. For example, the first haplotype problem described in the Methods section on Statistical analysis considers testing whether h₁ has the same risk as the other haplotypes h₂, . . . , hₖ. Here the alternative grouping is [h₁], [h₂, . . . , hₖ] and the null grouping is [h₁, . . . , hₖ]. The second haplotype problem in the same section involves three haplotypes h₁=G0, h₂=GX and h₃=AX, and the focus is on comparing h₁ and h₂. The alternative grouping is [h₁], [h₂], [h₃] and the null grouping is [h₁, h₂], [h₃]. The actual problem we faced in FIG. 11.1 is actually slightly more complicated because allele X is a composite allele that includes five alleles other than allele 0, and hence GX and AX each correspond to five haplotypes. One could have collapsed these alleles into one at the data processing stage, and performed the test as described. This is a perfectly valid approach, and indeed, whether we collapse or not makes no difference if there were no missing information regarding phase. But, with the actual data, each of the 5 alleles making up X correlates differently with the SNP alleles and this provides some partial information on phase. Collapsing at the data processing stage will unnecessarily increase the amount of missing information. What was actually done is natural in the nested-models/partition framework. Let h₂ be split into h₂ₐ, h_{2b}, h₂ₑ, and h₃ be split into h₃ₐ, h_{3b}, . . . , h₃ₑ. Then the alternative grouping is [h₁], [h₂ₐ, h_{2b}, . . . , h₂ₑ], [h₃ₐ, h_{3b}, . . . , h₃ₑ] and the null grouping is [h₁, h₂ₐ, h_{2b}, . . . , h₂ₑ], [h₃ₐ, h_{3b}, . . . , h₃ₑ]. The same method is used to handle the composite haplotypes in FIG. 11.2 and 11.3 where collapsing at the data processing stage is not even an option since L_{C} represents multiple haplotypes constructed from 25 SNPs. Here, we also want to mention that, apart from the pair-wise comparisons presented in FIG. 11.1, a 3-way test with the alternative grouping of [h₁], [h₂ₐ, h_{2b}, . . . h₂ₑ], [h₃ₐ, h_{3b}, . . . , h₃ₑ] versus the null grouping of [h₁, h₂ₐ, h_{2b}, . . . , h₂ₑ, h₃ₐ, h_{3b}, . . . , h₃ₑ] could also be performed. Note that the generalized likelihood ratio test-statistic would have two degrees of freedom instead of one. We actually have performed this test and it gave a p-value of 2.4×10⁻⁷.

Measuring Information

[0221] Even though likelihood ratio tests based on likelihoods computed directly for the observed data, which have captured the information loss due to uncertainty in phase and missing genotypes, can be relied on to give valid p-values, it would still be of interest to know how much information had been lost due to the information being incomplete. Interestingly, one can measure information loss by considering a two-step procedure to evaluating statistical significance that appears natural but happens to be systematically anti-conservative. Suppose we calculate the maximum likelihood estimates for the population haplotype frequencies calculated under the alternative hypothesis that there are differences between the affected population and control population, and use these frequency estimates as estimates of the observed frequencies of haplotype counts in the affected sample and in the control sample. Suppose we then perform a likelihood ratio test treating these estimated haplotype counts as though they are the actual counts. We could also perform a Fisher's exact test, but we would then need to round off these estimated counts since they are in general non-integers. This test will in general be anti-conservative because treating the estimated counts as if they were exact counts ignores the uncertainty with the counts, overestimates the effective sample size and underestimates the sampling variation. It means that the chi-square likelihood-ratio test statistic calculated this way, denoted by Λ*, will in general be bigger than Λ, the likelihood-ratio test-statistic calculated directly from the observed data as described in methods. But Λ* is useful because the ratio Λ/Λ* happens to be a good measure of information, or 1−(Λ/Λ*) is a measure of the fraction of information lost due to missing information. This information measure for haplotype analysis is described in Nicolae and Kong, Technical Report 537, Department of Statistics, University of Statistics, University of Chicago, Revised for Biometrics (2003) as a natural extension of information measures defined for linkage analysis, and is implemented in NEMO.

Haplotype Association

[0222] We first considered haplotypes based on the most significantly associated SNPs and microsatellite, SNP45, SNP41 and AC008818-1, which are all in block B and are separated by only 6 kb. Not surprisingly given the high degree of correlation between SNP45 and SNP41, we found that it was sufficient to consider only the two marker haplotypes consisting of the microsatellite and SNP45—the SNP with the higher genotype yield. The results of this association study for the combination of carotid and cardiogenic stroke are displayed in FIG. 11.1. Note that, for convenience, we have designated by the letter X the joint set of alleles that are not the at-risk allele, 0, of microsatellite AC008818-1. Thus, GX should be understood as the composite of all haplotypes including the G nucleotide of SNP45 except for the G0 haplotype. For our samples, the AO haplotype does not exist. This suggests that allele 0 originated in a haplotype background with allele G of SNP45, and since then no recombination has occurred between those two markers for chromosomes that carried allele 0. AX, G0 and GX have significantly distinct risks for the combined carotid and cardiogenic stroke phenotype. We refer to GX as the wild type because it is the most common (53.4% in controls) and also because it has the intermediate level risk that is not too different from the population risk. The haplotype G0 has increased risk and AX is protective, with risks of 1.46 and 0.70 relative to the wild type, respectively. The G0 risk is 2.07 times that of the protective haplotype AX. Each of the three pairwise comparisons is highly significant, with p-values ranging from 0.006 to 7.2×10⁻⁸. It is interesting to observe that even though both AX and GX are composite haplotypes, the AX haplotype can be simply summarized by the allele A of SNP45, since the A0 haplotype does not exist. For a similar reason, the G0 haplotype is completely determined by the 0 allele of AC008818-1. Also displayed in FIG. 11.1 is the information content (Info) of each test. The difference between Info and 1 is a measure of the information that is lost due to the uncertainty with phase and missing genotypes. Note that Info is very close to 1 for each of the three tests in FIG. 11.1. That is a result of SNP45 and AC008818-1 being in very strong LD. Note that tests presented later in FIG. 11.2 and 11.3, involving longer haplotypes have lower information content.

[0223] We next identified and estimated the risks for the common SNP haplotypes within each block. For this portion of the analysis only those SNPs with minor allele frequency greater than 20% were considered. Block A (300 kb) contained 19 such SNPs, block B (200 kb) 22 SNPs, and block C (60 kb) 25 SNPs. All haplotypes within each block with an estimated frequency in the population of 2% or greater have been identified. Within each block there were fewer than ten such haplotypes, and they accounted for approximately 80% of the total haplotype frequency for that block. A brief schematic of the identified haplotypes are displayed in FIG. 13.2 and the risks and frequencies of these haplotypes are available in Table 3. Within block A no common haplotype has greater risk than SNP87 alone. The strongest signals were for haplotypes in block B and C. Each block contained a haplotype significantly associated with the combination of carotid and cardiogenic stroke and having relative risk around 1.5. The common at-risk haplotype in block B is the SNP background of the G0 haplotype previously identified.

[0224] While there were no significant single marker associations in block C, a common haplotype with 15.4% frequency in controls was observed. We designate this haplotype H_{C}. Investigation of the contribution of H_{C} in conjunction with the SNP45 and AC008818-1 haplotypes leads to another interesting observation. For notation, all haplotypes defined by the 25 SNPs in block C that are not H_{C} are jointly denoted by the composite haplotype L_{C}. First, it is noted that AX and H_{C} do not exist together on the same chromosome (see FIG. 11.3), at least in these samples, and thus blocks B and C are far from being independent. As a consequence, the extended composite haplotype AXL_{C} is the same as AX. The haplotype G0 can be split into the two extended haplotypes G0H_{C} and the composite G0L_{C}, which, as indicated in FIG. 11.2, have significantly different risks (p value=0.0067). Moreover, it appears that the elevated risk of G0 is totally accounted for by G0H_{C} as G0L_{C} has risk that is not significantly different from GX=GXH_{C}+GXL_{C} (see FIG. 11.2). This observation allows us to refine the haplotype groupings of FIG. 13.1 into the groupings indicated by FIG. 13.3. The extended at-risk haplotype G0H_{C} (8.8% in controls) and protective composite haplotype AXL_{C} (21.1% in controls), have, respectively, relative risks of 1.98 and 0.68 compared to the wild type (70.1% in controls). Based on these risk estimates, if everybody's risk can be made to correspond to that of a homozygote carrier of the protective variant, the number of cases would be reduced by 55%, which can be interpreted as the population attributed risk of the at-risk haplotype and the wild type combined.

[0225] The at-risk haplotype G0H_{C} spans a region of about 64 kb. While it is possible that the increased risk is due to multiple polymorphisms over that region, the results are also consistent with a relatively recent mutation, as yet to be identified, which occurred in that haplotype background, and since then no recombination has occurred in that extended region for chromosomes carrying the mutation. By contrast, the protective composite haplotype AXL_{C} can be simply represented by allele A of SNP45. Hence, it is possible that allele A of SNP45 is the functional protective variant, although it is possible that the functional variant is simply in strong LD with allele A of SNP45 and has yet to be identified. Indeed, statistically, the effects of SNP45 and SNP41 are indistinguishable from each other.

Statistical Analysis.

[0226] For single marker association to the disease, the Fisher exact test was used to calculate two-sided p-values for each individual allele. All p-values were presented unadjusted for multiple comparisons unless specifically indicated. The presented frequencies (for microsatellites, SNPs and haplotypes) were allelic frequencies as opposed to carrier frequencies. To minimize any bias due the relatedness of the patients who were recruited as families for the linkage analysis, we eliminated first and second-degree relatives from the patient list. Furthermore, we have repeated the test for association correcting for any remaining relatedness among the patients, by extending a variance adjustment procedure described in Risch, N. & Teng, J. (Genome Res., 8:1278-1288 (1998)). The relative power of family-based and case-control designs for linkage disequilibrium studies of complex human diseases I. DNA pooling. (ibid) for sibships so that it can be applied to general familial relationships, and present both adjusted and unadjusted p-values for comparison. The differences are in general very small as expected. To assess the significance of single-marker association corrected for multiple testing we carried out a randomisation test using the same genotype data. We randomised the cohorts of patients and controls and redid the association analysis. This procedure was repeated up to 500,000 times and the p-value we presented is the fraction of replications that produced a p-value for some marker allele that is lower than or equal to the p-value we observed using the original patient and control cohorts.

[0227] For both single-marker and haplotype analyses, relative risk (RR) and the population attributable risk (PAR) were calculated assuming a multiplicative model (haplotype relative risk model), (Terwilliger, J. D. & Ott, J., Hum Hered, 42, 337-46 (1992) and Falk, C. T. & Rubinstein, P, Ann Hum Genet 51 (Pt 3), 227-33 (1987)), i.e., that the risks of the two alleles/haplotypes a person carries multiply. For example, if RR is the risk of A relative to a, then the risk of a person homozygote AA will be RR times that of a heterozygote Aa and RR² times that of a homozygote aa. The multiplicative model has a nice property that simplifies analysis and computations—haplotypes are independent, i.e., in Hardy-Weinberg equilibrium, within the affected population as well as within the control population. As a consequence, haplotype counts of the affecteds and controls each have multinomial distributions, but with different haplotype frequencies under the alternative hypothesis. Specifically, for two haplotypes hᵢ and hⱼ, risk(hᵢ)/risk(hⱼ)=(fᵢ/pᵢ)/(fⱼ/pⱼ), where f and p denote respectively frequencies in the affected population and in the control population. While there is some power loss if the true model is not multiplicative, the loss tends to be mild except for extreme cases. Most importantly, p-values are always valid since they are computed with respect to null hypothesis.

[0228] In general, haplotype frequencies are estimated by maximum likelihood and tests of differences between cases and controls are performed using a generalized likelihood ratio test (Rice, J. A. Mathematical Statistics and Data Analysis, 602 (International Thomson Publishing, (1995)). deCODE's haplotype analysis program called NEMO, which stands for NEsted MOdels, was used to calculate all the haplotype results presented. To handle uncertainties with phase and missing genotypes, it is emphasized that we do not use a common two-step approach to association tests, where haplotype counts are first estimated, possibly with the use of the EM algorithm, Dempster, (A. P., Laird, N. M. & Rubin, D. B., Journal of the Royal Statistical Society B, 39, 1-38 (1971)) and then tests are performed treating the estimated counts as though they are true counts, a method that can sometimes be problematic and may require randomisation to properly evaluate statistical significance. Instead, with NEMO, maximum likelihood estimates, likelihood ratios and p-values are computed with the aid of the EM-algorithm directly for the observed data, and hence the loss of information due to uncertainty with phase and missing genotypes is automatically captured by the likelihood ratios. Even so, it is of interest to know how much information is retained, or lost, due to incomplete information. Described herein is such a measure that is natural under the likelihood framework. For a fixed set of markers, the simplest tests we performed, with results presented in Table 3, compare one selected haplotype against all the others. Call the selected haplotype h₁ and the others h₂, . . . , hₖ. Let p₁, . . . , pₖ denote the population frequencies of the haplotypes in the controls, and f₁, . . . , fₖ denote the population frequencies of the haplotypes in the affecteds. Under the null hypothesis, fᵢ=p₁ for all i. The alternative model we use for the test assumes h₂, . . . , hₖ to have the same risk while h₁ is allowed to have a different risk. This implies that while p₁ can be different from f₁, f₁/(f₂+ . . . +fₖ)=pᵢ/(p₂+ . . . +pₖ)=βᵢ for i=2, . . . , k. Denoting f₁/p₁ by r, and noting that β₂+ . . . +βₖ=1, the test statistic based on generalized likelihood ratios is
Λ=2[l(\hat{r}, \hat{p}₁, \hat{β}₂, . . . , \hat{β}ₖ₋₁)−l(1, \tilde{p}₁, \tilde{β}₂, . . . , \tilde{β}ₖ₋₁)]
where l denotes logₑlikelihood and ~ and ˆ denote maximum likelihood estimates under the null hypothesis and alternative hypothesis respectively. Λ has asymptotically a chi-square distribution with 1-df, under the null hypothesis and it was used to compute p-values presented in Table 3. The tests presented in FIG. 11 have slightly more complicated null and alternative hypotheses. For the results in FIG. 11, let h₁ be G0, h₂ be GX and h₃ be AX. When comparing G0 against GX, i.e., this is the test which gives estimated RR of 1.46 and p-value=0.0002, the null assumes G0 and GX have the same risk but AX is allowed to have a different risk. The alternative hypothesis allows all three haplotype groups to have different risks. This implies that, under the null hypothesis, there is a constraint that f₁/p₁=f₂/p₂, or w=[f₁/p₁]/[f₂/p_{2]=1}. The test statistic based on generalized likelihood ratios is
Λ=2[l(\hat{p}₁, \hat{f}₁, \hat{p}₂, ŵ)−l(\tilde{p}₁, \tilde{f}₁, \tilde{p}₂, 1)]
that again has asymptotically a chi-square distribution with 1-df under the null hypothesis. There is actually an extra complication to the test due to h₂ and h₃ being composite haplotypes. That is handled in a natural manner under the nested models framework. Other tests presented in FIG. 11.2 and 11.3 were similarly performed.

[0229] LD between pairs of SNPs was calculated using the standard definition of D′ and R² (Lewontin, R., Genetics 49, 49-67 (1964) and Hill, W. G. & Robertson, A. Theor. Appl. Genet. 22,226-231 (1968)). Using NEMO, frequencies of the two marker allele combinations are estimated by maximum likelihood and deviation from linkage equilibrium is evaluated by a likelihood ratio test. The definitions of D′ and R² were extended to include microsatellites by averaging over the values for all possible allele combination of the two markers weighted by the marginal allele probabilities. When plotting all marker combination to elucidate the LD structure in a particular region, we plot D′ in the upper left corner and the p-value in the lower right corner. In the LD plots we present the markers are plotted equidistant rather than according to their physical location.

TABLE 3
Haplotype diversity at the 5′end of the PDE4D gene.
All haplotypes shown that have >2% population frequency within each of the 3 blocks
of strong LD together with the haplotype association results comparing the combination
of cardiogenic and carotid stroke versus controls.
Block A:

| SNP 102 | SNP 101 | SNP 100 | SNP 99 | SNP 98 | SNP 97 | SNP 96 | SNP 95 | SNP 93 | SNP 92 | SNP 90 | SNP 88 |
|---|---|---|---|---|---|---|---|---|---|---|---|
| T | G | T | A | T | G | A | G | A | G | A | G |
| C | G | C | A | C | C | G | A | G | A | G | A |
| C | G | C | A | C | C | G | A | G | A | G | A |
| C | G | C | A | C | C | G | A | G | A | G | A |
| C | G | C | G | C | G | A | G | A | G | A | G |
| C | A | C | A | C | C | A | G | A | G | A | G |
| C | A | C | A | C | C | A | G | A | G | A | G |
| C | A | C | G | C | G | A | G | A | G | A | G |

| SNP 87 | SNP 86 | SNP 84 | SNP 83 | SNP 82 | SNP 81 | SNP 80 | SNP 79 | p-value | Aff % | Ctrl % | RR |
|---|---|---|---|---|---|---|---|---|---|---|---|
| T | A | G | C | G | G | T | C | 0.0302 | 26.7 | 22.2 | 1.28 |
| C | G | G | C | G | G | T | C | 0.366 | 2.1 | 2.9 | 0.73 |
| C | G | A | T | G | G | A | T | 0.303 | 2.6 | 3.6 | 0.71 |
| C | G | A | T | A | G | A | T | 0.335 | 22.5 | 24.5 | 0.89 |
| T | A | G | C | G | A | A | T | 0.216 | 12.6 | 10.6 | 1.23 |
| T | A | G | C | G | A | A | T | 0.876 | 2.2 | 2.4 | 0.94 |
| C | A | A | T | G | G | T | C | 0.001 | 6.5 | 11.2 | 0.55 |
| T | A | G | C | G | A | A | T | 0.401 | 7.9 | 6.6 | 1.20 |

Block B:

| SNP-77 | SNP-76 | SNP-73 | SNP-71 | SNP-69 | SNP-67 | SNP-66 | SNP-64 | SNP-63 | SNP-62 | SNP-61 | SNP-59 | SNP-57 |
|---|---|---|---|---|---|---|---|---|---|---|---|---|
| A | A | T | G | T | A | A | G | A | A | C | A | G |
| A | A | T | G | T | A | A | G | A | C | T | A | A |
| G | A | C | A | T | A | A | G | A | A | C | A | G |
| G | A | C | A | T | G | G | A | G | A | T | A | A |
| G | A | C | A | T | G | G | A | G | C | T | A | A |
| G | G | C | A | T | G | A | G | A | A | C | C | G |

| SNP-56 | SNP-54 | SNP-53 | SNP-49 | SNP-48 | SNP-45 | SNP-42 | SNP-41 | SNP-39 | p-value | Aff % | Ctrl % | RR |
|---|---|---|---|---|---|---|---|---|---|---|---|---|
| T | A | C | C | T | G | A | A | T | 0.0004 | 29.2 | 21.4 | 1.52 |
| A | A | T | T | C | A | G | G | A | 0.007 | 4.3 | 7.6 | 0.55 |
| T | A | C | C | T | G | A | A | T | 0.958 | 2.0 | 2.1 | 0.98 |
| A | A | T | T | C | G | G | A | T | 0.610 | 6.2 | 5.6 | 1.13 |
| A | A | T | T | C | A | G | G | A | 0.0104 | 3.4 | 6.3 | 0.52 |
| T | G | T | C | T | G | A | A | T | 0.803 | 14.6 | 14.1 | 1.04 |

Block C:

| SNP 37 | SNP 35 | SNP 34 | SNP 32 | SNP 31 | SNP 30 | SNP 28 | SNP 27 | SNP 26 | SNP 24 | SNP 23 | SNP 22 | SNP 20 | SNP 19 |
|---|---|---|---|---|---|---|---|---|---|---|---|---|---|
| T | A | A | C | C | A | C | G | A | A | C | T | T | A |
| G | A | A | C | C | A | C | G | A | A | T | C | C | G |
| G | A | A | C | C | A | C | G | A | A | T | C | C | G |
| G | A | A | C | C | A | C | G | A | T | T | C | T | A |
| G | G | C | T | T | C | C | G | A | A | C | T | T | A |
| G | G | C | T | T | C | C | G | A | A | T | C | C | G |
| G | G | C | T | T | C | G | A | G | T | T | C | T | A |

| | | | | | | | | | | | | Aff | Ctrl | |
|---|---|---|---|---|---|---|---|---|---|---|---|---|---|---|
| SNP 16 | SNP 15 | SNP 14 | SNP 13 | SNP 12 | SNP 6 | SNP 5 | SNP 4 | SNP 3 | SNP 2 | SNP 1 | p-value | % | % | RR |
| T | T | G | A | A | T | T | T | G | A | A | 0.0006 | 22.2 | 15.4 | 1.58 |
| C | C | G | A | G | C | A | T | C | A | A | 0.533 | 2.2 | 2.8 | 0.78 |
| C | C | G | A | G | T | T | T | G | A | A | 0.24 | 3.0 | 2.0 | 1.52 |
| C | C | A | G | G | C | A | C | C | T | G | 0.302 | 2.6 | 1.8 | 1.46 |
| T | T | G | A | A | T | T | T | G | A | A | 0.258 | 2.0 | 3.0 | 0.68 |
| C | T | G | A | G | C | A | T | C | T | G | 0.0078 | 7.8 | 12.0 | 0.62 |
| C | C | A | G | G | C | A | C | C | T | G | 0.781 | 32.9 | 33.6 | 0.97 |

Allelic definitions and polymorphisms for SNPs in the two most significant haplotypes (in block B and C).

[0230] The analysis presented above represents a conservative analysis of the data since it restricted the analysis to SNPs with minor allelic frequencies of greater than 20%. To further understand the magnitude of the contribution of PDE4D to stroke in this 5 prime region, we repeated the analysis without such restrictions, including all SNPs selected for genotyping. We found a SNP haplotype for the two major subtypes of ischemic stroke, carotid and cardiogenic stroke (Table 3, Block C). This is a 5 SNP haplotype that covers an area of 48 kb and is just upstream of the 5′exon covering the presumed promoter region of isoform PDE4D7. It captures the same information as the 0 allele for marker AC008818-1. However, the SNP haplotype is more specific in the sense that it has a higher relative risk, i.e., 2.3. This haplotype is carried by 47% of the patients and has the same population attributable risk (PAR) of 0.25. The polymorphisms and alleles for the SNPs are presented in Table 4A.

TABLE 4A

| | Public | | | |
|---|---|---|---|---|
| SNP | name if | | | Allele |
| Name | available | Polymorphism | Position | (nucleotide) |
| SNP42 | rs153031 | A/G | 138806 | 0 (A) |
| SNP5PDM361194 | | | | |
| SNP34 | rs27653 | C/A | 131865 | 0 (A) |
| SNP5PDM368135 | | | | |
| SNP32 | rs456009 | C/T | 129361 | 1 (C) |
| SNP5PDM370640 | | | | |
| SNP26 | rs40512 | G/A | 120628 | 0 (A) |
| SNP5PDM379372 | | | | |
| SNP9 | (new) | G/A | 91470 | 0 (A) |
| SNP5PDM408531 | | | | |

[0231] TABLE 4B

| | | | | | | | # | Aff. | # | Ctrl. | | | |
|---|---|---|---|---|---|---|---|---|---|---|---|---|---|
| Phenotype | SNP42 | SNP34 | SNP32 | SNP26 | SNP9 | p-value | Affect | Freq.* | Ctrl | Freq* | R-risk | PAR | info |
| All stroke | A | A | C | A | A | 2.17E−05 | 988 | 0.19 | 652 | 0.12 | 1.8 | 0.16 | 0.604 |
| Cardiogenic/ | A | A | C | A | A | 3.37E−07 | 313 | 0.236 | 652 | 0.119 | 2.3 | 0.25 | 0.616 |
| carotid | | | | | | | | | | | | | |

allelic frequency

[0232] The sequences for the microsatellite markers are as follows:

[0233] AC008879-2 amplimer:

(SEQ ID NO: 85)

ACAAAGAGCACCTTTCCAGTGGACAACTAACTAAAGTGGTGTGATTTTGG
TATAAGTTTGTGTGTGTGTGTGTGTGTGTGTTGTGTGTGTGTGTATGTGT
ATACATTTAGTTTTATTGTAACAAAGCAACTTGTACTTTTCACGTTTAAA
A

[0234] AC008879-2, allele 0 is the same allele as the minimum allele observed in CEPH 1347-02, family 137, individual 02.

[0235] In summary, this single SNP haplotype (which is only one haplotype of the several found above but is probably the most tightly associated to stroke) more than doubles an individual's risk for cardiogenic and carotid stroke and accounts for 25% of such strokes in Iceland. The other haplotypes described above provide additional risk for stroke. The magnitude of this risk haplotype is comparable or higher than the well-known clinical risk factors for stroke such as hypertension, diabetes, hyperlipidemia, and smoking.

These SNPs show strong association in patients with cardioembolic and large vessel disease.

[0236] Table 5 and Table 6 show previously known microsatellite markers and novel microsatellites in sequence. Forward and reverse primers are shown.

TABLE 5
Previously Known microsatellite markers in sequence

| | | | | |
|---|---|---|---|---|
| | | SEQ ID | | SEQ ID |
| Accession number | Forward primer | NO. | Reverse primer | NO. |

| | | | | | |
|---|---|---|---|---|---|
| D5S2107 | GDB:614475 | GCCTTTGGGCCAACA | 15 | CAAACCAACAGGAGTATGTACTTTT | 16 |
| D5S468 | GDB:593646 | AATGAATGGTAGATTLTAACCTGAG | 17 | TGGGAAAATAAATACATGCG | 18 |
| D5S2000 | GDB:608769 | TTATACCAGGAGAGTAGACTTTTTT | 19 | CATGGTAATTITCAAATATGAGAG | 20 |
| D5S2091 | GDB:613806 | GCATTTGTCATGTGCCA | 21 | GGTATTITCATTCACAGCCAGTC | 22 |
| D5S2500 | GDB:683034 | TTAAAGGAGTGATCTCCCCC | 23 | GTTACAGTACCTATGGTCATGCG | 24 |
| D5S2080 | GDB:613188 | GCACTGTGAATTTCAAATG | 25 | GTCAGGGGACTGGGAT | 26 |
| D5S2018 | GDB:609957 | CCTGTAAACAATGAAAACCCACTGA | 27 | GACTATGCTGTGTGTGTGGCTG | 28 |
| D5S2071 | GDB:612756 | TCTGGGTTTACAACCTTCAAA | 29 | TAACTGGCTTGGCCCG | 30 |

[0237] TABLE 6
Novel microsatellites in sequence:

| | | | |
|---|---|---|---|
| Forward primer | SEQ ID NO. | Reverse primer | SEQ ID NO. |

| | | | | |
|---|---|---|---|---|
| DG5S382 | CAGTAAATAGTTTGCTTCAGGCATT | 31 | CTCATACTCTGCGTGGCTTG | 32 |
| AC008829-5 | AGGGCTAAGTGGATCACAGC | 33 | AGAGGGTCTTGCCACTGTGT | 34 |
| AC008833-2 | TCTGCAAGACTCTCGGTGCT | 35 | TGCAGATCTCATATTTCCATGTTT | 36 |
| AC008833-3 | TCTGCCCTTTGTTCCTCATC | 37 | GTCAAGGGAGTGATGGCAGT | 38 |
| AC022125-3 | AAAATGACTGGCTCCCACAA | 39 | GGGAAATCATACTGCCCTCA | 40 |
| AC008833-6 | AAACATAGCCACCCTGTTGC | 41 | TCCAAAGCCCTTAGCTTAATCA | 42 |
| D17-C | GCTCCCTGGACTGTGGTAAA | 43 | GCCACATTGCTGTCACATTT | 44 |
| D17-B | TTTTTCAGGGCTGGGTAGAA | 45 | TCCAAAGGAAGTGAAATCAGTG | 46 |
| D17-D | CTAACCCATCCTCACCCAAT | 47 | TGTGGCATACAGGGAAGTGA | 48 |
| AC008804-1 | GTGCTGGAATTTGGCTCCTA | 49 | CAAACATCATTTTGCCTTGC | 50 |
| AC008804-2 | TCCCAAACGATAGCTGTTGC | 51 | GAATTAGGACGGTGGCTCAA | 52 |
| AC008804-3 | TTTGCATTCATCACTCATTCG | 53 | CCCGTAGCATCTGATCCAGT | 54 |
| D17-H | AGAAAGCTTCCCCTCCACTG | 55 | CATTCCAGCCTGAGCTACAA | 56 |
| D17-G | TGGGCTCCAATTATCCTTCC | 57 | TGCAGTTTGCACTCTCCTTG | 58 |
| AC027322-12 | TTATCTGTTCCCCATGCTTTT | 59 | TGTTACATCTFGATCTATGACGTTT | 60 |
| AC027322-10 | TGTATCCTGCATCCCTTGTT | 61 | GGAATAACCCAAAAGTAATTGTAGTGA | 62 |
| AC027322-9 | TCGTGCCAAGATGAAAATGA | 63 | AAACCTCCCTGATCATCTGAA | 64 |
| AC027322-8 | ACAGAGGAGCAAAGGAATCA | 65 | TTGGCACGAATCACTCTCTG | 66 |
| AC027322-3 | CCCCATTTGGATGATGGTAA | 67 | TGAGAACATCTAACGTCTTTTTCAA | 68 |
| AC027322-5 | GGCACAGATAACTGGGAAGC | 69 | CCCCCAAAAGTACTGCATAAA | 70 |
| DG5S397 | ATGTTGGCATTTGGTGAGGT | 71 | CACCTGTGCCTTTCCAGTA | 72 |
| AC008879-2 | TAAACGTGAAAAGTACAAGTTGC | 73 | ACAAAGAGCACCTTTCCAGTG | 74 |
| *AC008818-1 | TGCTTGGTGAAGGAATAGCC | 75 | GAGCCTGGGTFCTCAGGAAT | 76 |
| **AC008879-3 | GGCAAGAACAGTTTGGAGGA | 77 | GACTGCTGTTTGCTGGTTGA | 78 |
| AC020733-1 | AAATGGCTATAAAGTGCTTTGAAC | 79 | CGGTCTCAACAACCAGAACA | 80 |
| AC016591-2 | CAGAAACACACAGAAGTCATTCAA | 81 | CAGACCCAATTAATGGCAAAA | 82 |
| DG5S405 | TCTGTCTTCTTTGACCCATGAAT | 83 | CAACACAGCGAGACCTCATC | 84 |

*Product Size 194, tetranucleotide repeat
**Product Size 150; dinucleotide repeat

[0238] TABLE 7
Correlation between at-risk alleles for markers AC008818-1,
SNP45 and SNP41. Estimates of LD (correlation) between
the at-risk alleles, allele 0 for marker AC008818-1, allele G for
SNP45 and allele A for SNP41, the three most significant
disease associated genetic markers.

| | R² | | |
|---|---|---|---|
| Frequency | AC008818-1 | SNP 45 | SNP 41 |

A. Combined cardiogenic and carotid patients

| | | | | | |
|---|---|---|---|---|---|
| D′ | AC008818-1 | 0.355 | | 0.090 | 0.076 |
| | SNP 45 | 0.863 | 1 | | 0.943 |
| | SNP 41 | 0.860 | 0.906 | 0.981 | |

B. Controls

| | | | | | |
|---|---|---|---|---|---|
| D′ | AC008818-1 | 0.255 | | 0.091 | 0.078 |
| | SNP 45 | 0.780 | 1 | | 0.920 |
| | SNP 41 | 0.768 | 0.924 | 0.968 | |

[0239] TABLE 8
Association of risk factors.
Association of microsatellite AC008818-1 at-risk allele 0, SNP45 allele A and haplotype
G0H_{c} respectively with various risk factors.
Cases are stroke patients with risk factors and controls are stroke patients without the
risk factors. P-values are two-sided.

| | AC008818-1:Allele 0 | | | | | SNP45:Allele A | | | | | Haplotype G0H_{c} | | | | |
|---|---|---|---|---|---|---|---|---|---|---|---|---|---|---|---|
| | | | Cases | | | | | Cases | | | | | Cases | | |
| | Cases with | | without risk | | | Cases with | | without | | | Cases with | | without | | |
| | risk factor | | factor | | P- | risk factor | | risk factor | | | risk factor | | risk factor | | P- |
| | N | Frq. | N | Frq. | value | N | Frq. | N | Frq. | P-value | N | Frq. | N | Frq. | value |
| Hypertension | 477 | 0.303 | 203 | 0.303 | 1.000 | 416 | 0.172 | 181 | 0.188 | 0.510 | 503 | 0.134 | 216 | 0.123 | 0.634 |
| Hyper- | 274 | 0.336 | 312 | 0.271 | 0.025 | 242 | 0.216 | 277 | 0.186 | 0.516 | 287 | 0.153 | 329 | 0.104 | 0.026 |
| cholesterolemi | | | | | | | | | | | | | | | |
| Diabetes | 93 | 0.274 | 424 | 0.310 | 0.379 | 79 | 0.196 | 398 | 0.176 | 0.422 | 100 | 0.127 | 455 | 0.133 | 0.857 |
| Peripheral | 133 | 0.297 | 357 | 0.305 | 0.815 | 116 | 0.181 | 340 | 0.176 | 0.921 | 138 | 0.121 | 388 | 0.132 | 0.697 |
| artery | | | | | | | | | | | | | | | |
| occlusive | | | | | | | | | | | | | | | |
| Coronary | 179 | 0.302 | 429 | 0.318 | 0.588 | 153 | 0.170 | 406 | 0.182 | 0.662 | 181 | 0.122 | 467 | 0.141 | 0.444 |
| artery disease | | | | | | | | | | | | | | | |
| Early onset | 349 | 0.294 | 462 | 0.304 | 0.137 | 314 | 0.186 | 430 | 0.173 | 0.538 | 380 | 0.128 | 506 | 0.125 | 0.876 |
| (<68) | | | | | | | | | | | | | | | |
| Males vs | 457 | 0.291 | 358 | 0.310 | 0.414 | 420 | 0.181 | 303 | 0.168 | 0.575 | 489 | 0.122 | 370 | 0.141 | 0.315 |
| females | | | | | | | | | | | | | | | |

Discussion of Stroke Gene Identification

[0240] Genealogy, a comprehensive population-based list of broadly defined stroke patients and non-parametric allele sharing methods have been combined to successfully map a major gene to chromosome 5 for one of the most complex diseases known. We then used a large case-control association study that showed that PDE4D is the gene in this location that is the gene conferring substantial risk for stroke. This is the first gene ever mapped and isolated for the common forms of stroke. There was no correlation between the contribution of the families to this gene location and hypertension, diabetes or hyperlipidemias and this gene does not match any known gene contributing to these risk factors. The types of stroke studied in this work do not reflect a rare or Icelandic-specific form of stroke; rather, the diversity of the stroke phenotypes in Icelanders as well as risk factors are similar to those of most other Caucasian populations (Agnarsson, U., et al., Ann. Intern. Med., 130:987 (1999); Eliasson, J. H., et al., Loeknabladid, 85:517-25 (1999); Sveinbjörnsdottir, S., et al., Systematic registration of patients with Stroke and TIA admitted to The National University Hospital, Reykjavik, Iceland, in 1997, XIII. Meeting of the Icelandic Association in Internal Medicine, Akureyri, Iceland (Valdimarsson, E. M., et al., Loeknabladid 84:921 (1998)).

[0241] The magnitude of the risk and the frequency of the disease haplotypes in the general population confirm that we have mapped a gene for the common forms of stroke and not some rare form of stroke. This gene almost doubles one's risk for stroke in general, and more than doubles one's risk for the two most common subtypes of stroke, carotid and cardiogenic stroke. In addition, the most common disease haplotype has a population attributed risk of 25% (which means it accounts for 25% of the patients) and there are other haplotypes that we describe herein that are less common that accounts for other patients. Thus PDE4D is a major cause of stroke and its relative risk rivals those of hypertension, smoking, diabetes, and hyperlipidemia. PDE4D shows tighter correlation to the forms of stroke dependent on atherosclerosis (carotid and cardiogenic stroke) and it is expressed in cell types known to be important for atherosclerosis such as vascular smooth muscle cells, macrophages, and endothelial cells. This suggests that the strong effect that PDE4D variation has on stroke risk is through its role in the vascular biology of atherosclerosis (see discussion at the end of the examples). Example 2 details our sequencing of the entire PDE4D gene and the definition of its exon-intron structure based on new and old cDNAs, and Example 3 shows that the expression pattern of PDE4D isoforms correlates with a stroke associated haplotype.

### Example 2

### Sequencing and Characterization of the Human Gene and its RNA/Protein Isoforms

Sequence of the Stroke Gene Region

[0242] At the start of our work, there was little genomic sequence available in the public domain covering the stroke gene region. Therefore, we sequenced approximately 3 Mb of the area defined by one drop in lod. The locus on 5q12 indicated in the genome wide scan was physically mapped using bacterial artificial chromosomes (BACs). A set of overlapping clones for a 20 cM region was assembled through a combination of hybridization and BAC-fingerprint walking. Eighteen BACs (bacterial artificial clones) (RP11-164A5, RP11-188115, RP11-313P15, RP11-631M6, RP11-103A15, RP11-489L13, RP11-621C19, RP11-113C1, RP11-567M18, RP11-412M9, RP11-15G2, RP11-15F7, RP11-281M3, RP11-421L6, RP11-1A7, RP11-68E13, RP11-379P8, and RP11-422K3) covering the minimum tiling path of the one LOD interval were analysed using shotgun cloning and sequencing. Dye terminator (ABI PRISM BigDye) chemistry was used for fluorescent automated DNA sequencing. ABI prism 377 sequences were used to collect data and the Phred/Phrap/Consed software package in combination with the Polyphred software were used to assemble sequences (See Table 9A and 9B) Publicly available sequences (AC008836, AC073546, AC021603, AC008498, AC016435, AC021601, AC016591, AC008818, AC008879, AC008934, AC01929, AC027322, AC008111, AC020924, AC026693, AC012315, AC08804, AC008791, AC020975, AC008833, AC008829, AC022125, AC008790, AC026095, AC066693, AC008852, AC016642, AC034250, AC025179, AC08814, AC008926, AC010391, AC016635 and AC016604) from this region were assembled with the obtained sequence and a 3.7 Mb sequence (with 22 gaps) was generated. Comparison of the current public human assembly (NCBI BUILD 33) to our sequence of the STRK1 locus only showed a minor discrepance.

[0243] The BAC clones we sequenced are from the RCPI-11 Human BAC library (Pieter dejong, Roswell Park). The vector used was pBACe3.6. The clones were picked into a 94 well microtiter plate containing LB/chloramphenicol (25 μg/ml)/glycerol (7.5%) and stored at −80° C. after a single colony has been positively identified through sequencing. The clones can then be streaked out on a LB agar plate with the appropriate antibiotic, chloramphenicol (25 μg/ml)/sucrose (5%).

TABLE 9A

| Sequenced at Decode | | |
|---|---|---|
| (BAC name) | Comment | Accession number |
| RP11-621C19 | 1 | AC020733 |
| RP11-113C1 | 2 | |
| RP11-412M9 | 2 | |
| RP11-151G2 | 2 | |
| RP11-151F7 | 2 | |
| RP11-281M3 | 2 | |
| RP11-421L6 | 2 | |
| RP11-68E13 | 2 | |
| RP11-379P8 | 2 | |
| RP11-1A7 | 1 | AC008111 |
| RP11-422K3 | 2 | |

Key to “Comment” column:
1 = This BAC has a publicly available sequence, it was sequenced at Decode to make sure the sequence was correct
2 = Only BAC end-sequence available for this BAC publicly.

[0244] TABLE 9B

| Sequences available from | | |
|---|---|---|
| GenBank (BAC name) | Accession number | Status of sequence |
| RP11-621C19 | AC020733 | 17 unordered pieces |
| CTD-2003D5 | AC016591 | complete sequence |
| CTD-2210C1 | AC008879 | 7 unordered pieces |
| CTD-2124H11 | AC008818 | complete sequence |
| CTD-2301A11 | AC008934 | complete sequence |
| RP11-16B11 | AC011929 | 7 unordered pieces |
| CTC-261E10 | AC026693 | complete sequence |
| CTD-2027G10 | AC027322 | complete sequence |
| RP11-1A7 | AC008111 | 8 unordered pieces |
| CTD-2122K7 | AC012315 | complete sequence |
| CTD-2085F10 | AC008804 | complete sequence |
| CTD-2040J22 | AC008791 | complete sequence |
| RP11-235N16 | AC020975 | 16 ordered pieces |
| CTD-2146O16 | AC008833 | complete sequence |
| CTD-2084I4 | AC022125 | 17 ordered pieces |
| CTD-2140K22 | AC008829 | 26 ordered pieces |
| CTD-2124D11 | AC020924 | 7 ordered pieces |
| RP11-731H6 | AC026095 | 21 unordered pieces |

PDE4D Gene; Identification of New Exons and Splice Variants

[0245] The gene, human cAMP specific phosphodiesterase 4D (HPDE4D) was identified in the sequenced region by BLAST of our novel genomic sequence with the cDNAs/EST databases from GenBank. In addition, we ran RT-PCR reactions and 5 prime and 3 prime RACE reactions using cDNA libraries generated from a variety of tissues including human aorta. The primer sites used corresponded to known or exons predicted from our genomic sequence using Genscan, and Fgene. We found several novel cDNAs and matched them to the 3 Mb sequence in and around PDE4D. The genomic sequence covering all known and novel exons in PDE4D so far is approximately 1,550,000 bases in length.

[0246] We defined new alternative transcripts which together with previously known transcripts showed that the PDE4D gene contains 22 exons over at least 1.5 Mb and overlaps with the PART1 gene whose transcript is on the other strand at the 5′ end. The PDE4D gene has at least 7 promoters and encodes 8 protein isoforms. All isoforms have an identical C-terminal catalytic domain but differ at the N-terminal regulatory domain. Six of the 8 forms are so called long isoforms. Each of them have unique N-terminal regulatory domains but they are all characterized by two highly conserved regions found in all PDE4 subfamilies, i.e. upstream conserved regions 1 and 2 (UCR 1 and 2). The six long forms differ from each other by unique alternative 5 prime exons which predicts six alternative promoters that are each upstream of the corresponding 5 prime exon. The remaining two are the so-called short forms, variants that lack the UCR 1 (Houslay, M. D. & Adams, D. R., Biochem J, 370, 1-18 (2003)). The five previously known isoforms are encoded by 17 exons distributed over a segment of 0.9 Mb.

[0247] The three new exons D7A-1, D7A-2 and D7A-3 are spliced to one another and together splice onto exon LF1 forming the splice variant we named PDE4D7 (FIG. 3). Exon D7-1 is non-coding. Exons D8 and D9 are spliced by themselves onto exon LF1 forming two splice variants we named PDE4D8 and PDE4D9, respectively (FIG. 3).

[0248] In terms of genomic structure, the D7A exon extends the 5′ end of PDE4D by 590,000 bp, and the D8 and D9 exons lie between exons D3 and LF1(physical position of exons presented in Table 2C). The new PDE4D7 isoform has an open reading frame extending into LF1, resulting in additional 91 amino acids at the N-terminus of the predicted protein. The D8 and D9 5′ exons contain a long 5′ UTR, followed by an ATG near the end of the exons that extends an ORF into LF1 resulting in a novel N-terminal segments of 22 and 30 amino acids in the PDE4D8 and PDE4D9 predicted proteins, respectively. The new splice variants were verified by RT-PCR on different cDNA tissue panels and subsequent cloning and sequencing of the products.

[0249] The PDE4D gene encodes at least eight different isoforms. Six of the eight forms are the so-called long isoforms. Each of them has an unique N-terminal regulatory domain but they are all characterized by two highly conserved regions found in all PDE4 subfamilies, i.e., upstream conserved regions 1 and 2 (UCR 1 and 2). The remaining two isoforms are the short forms, variants which lack the UCR 1.

[0250] Three PDE4D isoforms have been submitted to GenBank by Memory Pharmaceuticals on Sep. 16, 2002 and Dec. 17, 2002, under accession numbers AF536975 (isoform named PDE4D6), AF536976 (named PDE4D7) and AF536977 (named PDE4D8). See also PCT WO 01/00851, published Jan. 4, 2001. The sequence AF536977 corresponds to our earlier reported PDE4D6 isoform and AF536976 corresponds partly to our earlier reported PDE4D7 isoform, however the first untranslated exon we named D7-1 is missing from this sequence. The sequence AF536975 is a new short PDE4D isoform. We have therefore changed the isoform names accordingly herein as follows: PDE4D6 is now called PDE4D8, PDE4D7 is now called PDE4D7 and PDE4D8 is now called PDE4D9. We have submitted the new PDE4D splice variants, PDE4D7 and PDE4D9 to GenBank (Accession numbers AY245866 and AY245867, respectively).

[0251] We have in addition identified 17 putative exons upstream of LF1, based on ESTs, mouse homologies and GeneMiner exon predictions. Primers designed from these exons were used in conjunction with primers from LF1 and exon3 for RT PCR in the hope of identifying novel exons. Novel exons were in turn used to design primers for various RT-PCR reactions. We also used 5′RACE primers, designed from the known exons upstream of LF1. We have to date identified 14 new exons, including exons belonging to UniGene Cluster Hs.343602 that have now been connected to LF1.

[0252] For the 5′ RACE reactions we used cDNA made from heart, SkNAS (neuroblastoma cell line) and HVAEnd 5050 (endothelial cell line). For RT-PCR reactions a number of cDNAs made of total RNA were used (see below)

[0253] Novel exons in Table 10A are in italics; previously know PDE4D exons in white. Exon 3 of EST AW272330 is included on the table as a representative of the 3′ of ESTs from UniGene cluster Hs 343602. The positions given are from SEQ ID NO: 1. Note the different splicing of 4D9-3.2, 4D9-3.1, and AW272330exon3. Total RNA was isolated from HeLa, SkNAs and Jurkat 77 cell cultures according to manual, using the TRIZOL® reagent provided by GibcoBRL. We used the GeneRacer™, ThermoZyme™ and TOPO TA cloning® (containing pCR®2.1-TOPO®) kits from Invitrogen following the manufacturer's protocol.

TABLE 10A

| | | | | supported by |
|---|---|---|---|---|
| exon # | EXON | SEQ ID 1 | SEQ ID 1 | EST(s) |
| 1 | 4D7-A | 108127 | 108217 | Yes |
| 2 | PDE4D7-1 | 142207 | 142328 | PDE4D |
| 3 | 4D7-4 | 257650 | 257705 | Yes |
| 4 | 4D7-8 | 288224 | 288393 | No |
| 5 | 4D7-B | 295203 | 295251 | No |
| 6 | 4D7-5 | 352169 | 352317 | No |
| 7 | 4D7-6 | 441914 | 442036 | No |
| 8 | PDE4D7-2 | 444645 | 444775 | PDE4D |
| 9 | 4D7-C | 482438 | 482719 | No |
| 10 | 4D7-7 | 597399 | 597534 | Yes |
| 11 | 4D7-9 | 626020 | 626092 | No |
| 12 | PDE4D7-3 | 641649 | 641878 | PDE4D |
| 13 | PDE4D4 | 736254 | 737226 | PDE4D |
| 14 | PDE4D5 | 861791 | 862202 | PDE4D |
| 15 | PDE4D3 | 1044051 | 1044190 | PDE4D |
| 16 | 4D9-1 | 1069544 | 1069629 | Yes |
| 17 | 4D9-2 | 1069936 | 1069993 | No |
| 18 | 4D9-3.2 | 1071661 | 1071795 | Yes |
| | 4D9-3.1 | 1071668 | 1071795 | |
| | AW272330exon3 | 1071668 | 1071901 | |
| 19 | 4D9-4 | 1121821 | 1121892 | No |
| 20 | 4D9-5 | 1247621 | 1247696 | No |
| 21 | PDE4D8 | 1273404 | 1273709 | PDE4D |
| 22 | PDE4D9 | 1354347 | 1355128 | PDE4D |
| | LF1exon | 1414511 | 1414702 | PDE4D |

[0254] Sequence of New Exons:

(SEQ ID NO: 88)

>4D7-A
GGCCTCGAGCAGAACTTCCCATTTGAGTGGGACCAAGAAGAGCATACAAA
GCTGAAATGTTCTCCAGAAGTTGATTTCCAATGGGGATAAA

(SEQ ID NO: 89)

>4D7-4_From Forward Primer
TGATTACAGGTTTTAGAGAAGAGGAACAATGCTTCCTCTGAGCCTGAAGA
AAAGAA

(SEQ ID NO: 90)

>4D7-8
AGTTCTGACCATGTCCTGTGTCACTCTCAAGCAGAGATTGAAAATGACAT
TCGTCCTTTACTTGTTCCAAGGAAGCAAACATTTTATAGTTTGAAACTGT
TTCTCTTGCATTTGCTTTGCAAGAGGTTTGCAGAAGTTAAGCCTCATGGA
GTCTTCTCTCCTTAACTTAA

(SEQ ID NO: 91)

>4D7-B
TGTGAAGAATTTGGAAATTGCAAGGAGCATGGGAAGGAGATGATTTGGG

(SEQ ID NO: 92)

>4D7-5
GAATGAAGAGGAAATCAAGACATACTTAGATAAAAACAGATTATCACCAG
GAGATCTGCTGTAAAAGAATGGCTAAAGGAAGTTAGCTAAGCAGAAAGGA
AGTAACATAAAAAGGAACCTTGGAACATCAGGGAGGACAAAAGAACATG

(SEQ ID NO: 93)

>4D7-C
TTTCTCTTTCTCCAATCACTCACTCTGGAGGCAGCTAGCTGTCAACTCAC
AAAGACACTCAAGCAGCCTATGGAAGAAGGCCACATGGTAAAATATGGAG
GCCTCCAGCCAACAGTCAGCAAGGAACTGAGACAAGTCAACAACCATGTG
AGTGACTCGAGAAGTGCTTCTCTAGCTCCAGTTGAGACTTGCAGTAGCAG
CAGCCTCAGCTGGCGGCTTGACTGCAATCTCTTGAGAGACCCTAAGCTCT
CCTGAATTCTTGATCCTTAGAAACTGTGTGAG

(SEQ ID NO: 94)

>4D7-6
GGTCTAGCTGTGTCCCAGAGAGCAACTTCCCTTTTCAAGGCAGCCCACTC
TGTGTGATGCTTTTTCCTAGGTATGGGCAACCCATCCCTCCTAGGGTGAA
AACTTCGCTGTTGCTAGTTCCAG

(SEQ ID NO: 95)

>4D7-7
AATGATGCCGTATTATTCTCCTGACCTAACTTCAAAGAAATAAAGAGTTT
GCAAGAAGAACTGCAGTTCTTCAAAGTACGCAATATGGATTTCCAAGATG
AATGTAGTTTCTCTCTCTGAGGAATTCTGAACAGTG

(SEQ ID NO: 96)

>4D7-9
GACTTGAGCATCTGAAGATTTTGGTTTCTGCAGAGGGTGGGAAAGGTTGA
ACCAATCCCCCATGGATACCAAG

(SEQ ID NO: 97)

>4D9-1
GGCTTTCCAGATCCCTGAAGATAAAATACAAACTCTCCAACAAGACCTTT
TGGCCATCAGGAACGCAGCACCTGGCTCTCTCACTA

(SEQ ID NO: 98)

>4D9-2
AAAGTCGCAGAGATAGCGGAGAACAAGAACCAGATCTCACAGTCATGGTG
CCAAAAGA

(SEQ ID NO: 99)

>4D9-3.1
CTGTTACCCTAGCATGACTGCTTCAGCGAAGAGATAAGAGCTTCTTTGAC
TTTTTCCACTGGAATTTTTCATGCCAGAAGAAATTGAACATGTGAGCCTG
GTGTCTGGAAGAGTAGCCTGGATTTATG

(SEQ ID NO: 100)

>4D9-3.2
AATTCAGCTGTTACCCTAGCATGACTGCTTCAGCGAAGAGATAAGAGCTT
CTTTGACTTTTTCCACTGGAATTTTTCATGCCAGAAGAAATTGAACATGT
GAGCCTGGTGTCTGGAAGAGTAGCCTGGATTTATG

(SEQ ID NO: 101)

>4D9-4
TTCCTTGATAGTTCCAATATCTGTAATCTTGTTGGTCTACCTGTGCAGTT
TATTCCACTGATTGTCTCTCAG

(SEQ ID NO: 102)

>4D9-5
GCGAAAATACTGAGGCTCAACAGACATAAAATGGCTTGAGTTACCAGGCT
ACAGTAGAACTAGGATTTCAGTCCAG

Splicing of the Exons as identified by RT-PCR/RACE
New exons are in italics.
[0255] RT4D7: 4D7-1+4D7-2+4D7-3+LF1
[0256] RT1: 4D7-1+4D7-8+4D7-2+4D7-3+LF1
[0257] RT2: 4D7-4+4D7-2+4D7-9+4D7-3+LF1
[0258] RT3: 4D7-2+4D7-3+LF1
[0259] RT4: 4D7-1+4D7-2+4D7-7+4D7-3+4D9-1+4D9-3.1
[0260] RT5: 4D7-1+4D7-2+4D7-3+4D9-2+4D9-3.1
[0261] Race6: 4D7-A+4D7-B+4D7-2+4D7-C+4D7-3
[0262] RT7: 4D7-1+4D7-4
[0263] RT8: 4D7-1+4D7-5+4D7-2
[0264] RT9: 4D7-1+4D7-6+4D7-2
[0265] RT10: 4D9-1+4D9-3.1+LF1
[0266] RT11: 4D9-2+4D9-3.2+LF1
[0267] RT12: 4D9-3+4D9-4+LF1
[0268] RT13: 4D9-3+4D9-4+4D9-5+LF1
[0269] RT14: 4D9-3+LF1

[0270] Detection of variants in cDNA from various tissues:

TABLE 10B

| | RT4D7 | RT1 | RT2 | RT3 | RT4 | RT5 | RT6 | RT7 | RT8 | RT9 | RT10 | RT11 | RT12 | RT13 | RT14 |
|---|---|---|---|---|---|---|---|---|---|---|---|---|---|---|---|
| Bone Marrow | − | − | − | * | − | − | n | n | n | n | n | − | − | − | − |
| Brain | + | − | − | * | − | − | n | n | n | n | n | n | − | + | − |
| fetal Brain | + | − | − | * | − | − | n | n | n | n | n | n | − | − | − |
| colon | + | + | − | * | − | − | n | n | n | n | n | n | − | − | − |
| Heart | − | − | − | − | − | − | − | − | − | − | − | − | − | − | + |
| HVAEend 5050 | − | − | n | n | n | n | + | − | − | − | + | + | n | n | + |
| Kidney | + | − | + | + | − | − | n | n | n | n | n | n | − | − | − |
| Liver | − | − | − | * | − | − | n | n | n | n | n | − | − | − | − |
| Placenta | − | − | − | * | − | − | n | n | n | n | n | − | − | − | − |
| Prostate | + | − | − | * | + | − | n | n | n | n | n | n | − | − | * |
| Salivary gland | + | − | − | * | − | − | n | n | n | n | n | n | − | − | − |
| Skeletal Muscle | − | − | − | − | − | − | n | n | n | n | n | n | + | − | + |
| SkNAS cell line | + | − | n | * | n | n | − | + | + | + | − | − | n | n | − |
| Spinal Cord | − | − | − | − | − | − | n | n | n | n | n | n | − | − | * |
| Spleen | − | − | − | * | − | − | n | n | n | n | n | n | − | − | + |
| Testis | − | − | − | − | − | − | n | n | n | n | n | n | − | − | * |
| Thymus | + | − | − | * | − | − | n | n | n | n | n | n | − | − | − |
| Thyroid | + | − | − | * | − | + | n | n | n | n | n | n | − | − | + |
| Trachea | + | − | − | * | − | − | n | n | n | n | n | n | − | − | − |
| Uterus | − | − | − | − | − | − | n | n | n | n | n | n | − | − | + |
| other# | − | − | − | − | − | − | n | n | n | n | n | n | − | − | − |

+ = present and verified by sequencing
* = product of the correct size present; not yet verified by sequencing
− = not detected
n = not checked
#These are: Adrenal Gland, Fetal Liver, Cerebellum, Lung, Small Intestine.

[0271] Two of the variants that are more widely expressed appear to be mutually exclusive: 4D7 [with 4D7-1 as first exon] was detected in 10 cDNAs while RT14 is found in 9cDNAs. Of these thyroid and prostate are the only tissues common to both variants.

[0272] The 13 new RT and RACE variants presented above (we had previously described the 4D7 variant), do not add any new translated sequence. The RT1 product is expected o be the same as the 4D7 putative protein. In variants RT2 and Race6 the exons between 4D7-2 and 4D7-3 interfere with the ORF with the first AUG and ORF being just inside LF1. Similarly Exon 4D9-3 contains stop codons in all 3 reading frames and Variants RT10, 11,12,13, and 14 having their ATG initiation codon inside LF1. It is not clear whether variants RT4 and RT5, which contain exon 4D9-3 extend to LF1 or have their 3′ at 4D9-3 (the latter possibility is supported by the EST data).

[0273] It is noteworthy that all variants except 4D7, RT3 and RT14 have been observed only in one of the cDNAs. Although all the new exons (except 4D9-3.1) have an AG/GT splice signal, it is plausible that these variants represent rare or aberrant events with little physiological significance.

[0274] The following exons contain Alu repetitive element sequences: 4D7-5 and 4D7-C. The gene specific reverse (3′) primer was designed for PDE4D exon LF1 (5′ GGCAATGGAGGAGTTCCGGGACA TA-3′; SEQ ID NO: 87 origin from Homo sapiens).

[0275] A contig for the incomplete genomic sequence of the PDE4D gene was submitted by others in November 2000 (GenBank entry NT_{—}023193 by International Human Genome Project collaborators). The size of the contig is 614 481 bp (including gaps) whereas our novel genomic sequence for the whole PDE4D region (i.e., from the first exon for PDE4D variant) is close to 1,690,000 bp and contains no gaps. The contig NT_{—}023193 comprises only 11 exons of the PDE4D gene (in FIG. 3, exons 4D1/D2-11) and the 5′ differently spliced exons are missing in the contig (in FIG. 3, exons D4, D5, D3, D8, D9, D7A-1, D7A-2, D7A-3, LF1, LF2, LF3 and LF4).

TABLE 13
New Isoforms

| Isoform | | | | |
|---|---|---|---|---|
| Name | Exon | | Size | Cell line |
| PDE4D7 | D7-1 | 5′ | 122 bp | SKNAS |
| PDE4D7 | D7-2 | Internal | 131 bp | SKNAS |
| PDE4D7 | D7-3 | Internal | 230 bp | SKNAS |
| PDE4D9¹ | D9 | 5′ | 782 bp | HeLa |

¹Formerly referred to in previous applications as PDE4D8

[0276] The sequences are as follows:

D7A-1:
ATAGTTGGCGTACCCTGAGGCCTGCCAGTTCCTGCCTTAATGCATATGTA
GTCGTAATTGAGTTCTGACACGGCCTTGGATGTTTCTGTCCTAAATAGCT
GACATTGCATCTTCAAGACTGT
D7A-2:
CATTCCAGTTGGCTTTTGAGTGGATACGTGCAGTGAGATCATTGACACTG
GAAACACTAGTTCCCATTTTAATTACTTAAAACACCACGATGAAAAGAAA
TACCTGTGATTTGCTTTCTCGGAGCAAAAGT
D7A-3:
GCCTCTGAGGAAACACTACATTCCAGTAATGAAGAGGAAGACCCTTTCCG
CGGAATGGAACCCTATCTTGTCCGGAGACTTTCATGTCGCAATATTCAGC
TTCCCCCTCTCGCCTTCAGACAGTTGGAACAAGCTGACTTGAAAAGTGAA
TCAGAGAACATTCAACGACCAACCAGCCTCCCCCTGAAGATTCTGCCGCT
GATTGCTATCACTTCTGCAGAATCCAGTGG (SEQ ID NO: 11;
includes D7A-1, D7A-2 and D7A-3)

[0277] New predicted amino-terminal protein sequence from above (PDE4D7):

(SEQ ID NO: 12)

MKRNTCDLLSRSKSASEETLIJSSNEEEDPFRGMEPYLVRRLSCRNIQLP
PLAFRQLEQADLKSESENIQRPTSLPLKILPLIAITSAESS
(90 amino acids)

(SEQ ID NO: 13)

D9:
TTCTCACTGCCCTGCGGTGTTTTGAACTGCCTTCTTACAGACGTCATACA
GCCCTTGAGGAATAGTTTCTGCCTGGTGAGATTGAATGATAGTTCTCATT
CACAAAACCCTGGATTCTAAGCAGGGACACACAGAAATTACTTTCGCAGG
TAAATCAGCCCACCCAGCCAAAGTGTGGAGAGATTTGTTCCTFTGGCTGA
CTTCTTTGCTCCACGGAGAGGAGTGTTTTCCTGTGCTTGCCCTGAAATGG
AACTTCCTTGACAGCTCTCCCGTGTTACAGTACCTCCCGGTCATTTTCTT
TTTCTCTCTCTCTACCTGCGCTCTTCGAGTGTCAGAAACCTTTAAAGCTG
TTACTATGGAATTGCAAAAAAGAGATCAAGTGACTCTTTCACTATGCTGG
TTTCCCTTGTGACCCAGATGAAGAATCAATTCAGAATTCAGTTCCTCCCT
TGGCATTGCAAGACACAGAAGAAACTGTCACTTCCTAACAGCCTAGTACT
GGAGTAAATTCAGTATGAAGGAAGAAAGCGCTCCTGCGTGTTAGAACCTT
GCCCATGAGCTGGACCGAGGACAGGAGATGGACTCCAGGAAAATTGGATT
TCTTCAAGCAGCCTCCCTTGGAAATGGAATATCTTTAAAATCTTCTTTGC
AGAAAGACAGTTAGAATGTATTAATCAGAATAGTTGAAGACTTATTTTCC
TTTTTATTTTTTTTCAAAATGAGCATTATTATGAAGCCAAGATCCCGATC
TACAAGTTCCCTAAGGACTGCAGAGGCAGTTTG

[0278] New predicted amino-terminal protein sequence from above (PDE4D9):

(SEQ ID NO: 14)

MSIIMKPRSRSTSSLRTAEAV (21 amino acids).

[0279] TABLE 11
Publically Available SNPS; SNP ID No. from NCBI Database

| | | | | | |
|---|---|---|---|---|---|
| rs286155 | rs27960 | rs27221 | rs149079 | rs789615 | rs37708 |
| rs286156 | rs27564 | rs27653 | rs149324 | rs401207 | rs37709 |
| rs2061250 | rs27565 | rs26955 | rs153067 | rs364917 | rs789389 |
| rs286150 | rs26948 | rs26956 | rs40354 | rs404202 | rs1423247 |
| rs206789 | rs40131 | rs153031 | rs26951 | rs440607 | rs874768 |
| rs1823062 | rs26949 | rs185190 | rs153029 | rs411255 | rs2042315 |
| rs1823063 | rs26950 | rs37762 | rs27223 | rs615429 | rs918590 |
| rs1445852 | rs26954 | rs37761 | rs27222 | rs789396 | rs918591 |
| rs766119 | rs26953 | rs1423471 | rs251726 | rs37684 | rs918592 |
| rs956721 | rs152324 | rs27224 | rs1862589 | rs1445893 | rs1115372 |
| rs248910 | rs35385 | rs1645013 | rs702556 | rs37685 | rs1345782 |
| rs248912 | rs40512 | rs1423472 | rs702554 | rs1086121 | rs1363862 |
| rs187481 | rs35386 | rs27220 | rs441391 | rs42222 | rs1423248 |
| rs153152 | rs35387 | rs1423473 | rs446883 | rs37707 | rs1423246 |
| rs1862614 | rs1995780 | rs1435077 | rs159624 | rs1008709 | rs298088 |
| rs2194256 | rs1508865 | rs1369287 | rs1159470 | rs1027747 | rs298087 |
| rs889305 | rs952110 | rs1017410 | rs159622 | rs869685 | rs1421401 |
| rs2113071 | rs1533019 | rs1017409 | rs256349 | rs869686 | rs298086 |
| rs2113072 | rs2117552 | rs1435076 | rs256348 | rs924880 | rs298085 |
| rs966220 | rs1545069 | rs1435075 | rs1501640 | rs1504983 | rs298084 |
| rs966221 | rs1545070 | rs1435074 | rs600611 | rs1504982 | rs298083 |
| rs719702 | rs973700 | rs978455 | rs159621 | rs877745 | rs298073 |
| rs2113073 | rs1583434 | rs1827340 | rs159625 | rs877744 | rs298072 |
| rs2113074 | rs1347401 | rs1393083 | rs1435072 | rs2164661 | rs298071 |
| rs2113075 | rs1949017 | rs988364 | rs173945 | rs981230 | rs1421400 |
| rs1035512 | rs723962 | rs1017408 | rs256356 | rs1437124 | rs402874 |
| rs1559277 | rs1355099 | rs2053155 | rs185351 | rs746477 | rs434368 |
| rs1981848 | rs1396473 | rs181923 | rs256355 | rs893191 | rs371011 |
| rs1544788 | rs1369285 | rs1546364 | rs2067024 | rs1992112 | rs298063 |
| rs1544790 | rs1435071 | rs173942 | rs256354 | rs298102 | rs298062 |
| rs1544791 | rs1435070 | rs159616 | rs173944 | rs298101 | rs298061 |
| rs851284 | rs1435083 | rs159620 | rs256353 | rs2164660 | rs298060 |
| rs1396476 | rs991551 | rs1501641 | rs986400 | rs298100 | rs298057 |
| rs1508860 | rs1154790 | rs159619 | rs1504981 | rs298098 | rs298056 |
| rs1974850 | rs1154789 | rs159614 | rs1120533 | rs298096 | rs1370230 |
| rs2136203 | rs714291 | rs159613 | rs256351 | rs298095 | rs297975 |
| rs2174994 | rs981760 | rs159612 | rs190458 | rs298094 | rs297974 |
| rs1508863 | rs1369288 | rs159611 | rs256352 | rs298093 | rs379578 |
| rs1508859 | rs977418 | rs194368 | rs171745 | rs1362942 | rs920190 |
| rs1508864 | rs977417 | rs661576 | rs1157709 | rs1362941 | rs1865962 |
| rs1396474 | rs977416 | rs299627 | rs1910790 | rs298091 | rs298018 |
| rs1543951 | rs1529843 | rs159608 | rs1910789 | rs298090 | rs298021 |
| rs2016324 | rs1529842 | rs159609 | rs1504985 | rs298089 | rs298022 |
| rs298023 | rs2053229 | rs296406 | rs697076 | rs37575 | rs1824154 |
| rs298024 | rs295974 | rs296405 | rs294478 | rs37576 | rs2112911 |
| rs298025 | rs295973 | rs295948 | rs953302 | rs1876209 | rs1551564 |
| rs298026 | rs295972 | rs295947 | rs294479 | rs190486 | rs2034895 |
| rs298027 | rs295971 | rs295946 | rs697075 | rs447261 | rs2081092 |
| rs298028 | rs295970 | rs295945 | rs294481 | rs1506558 | rs2112910 |
| rs298029 | rs295969 | rs295944 | rs294482 | rs1108916 | rs918583 |
| rs298030 | rs295968 | rs1395334 | rs294483 | rs921942 | rs1840838 |
| rs169868 | rs295966 | rs295943 | rs702545 | rs924998 | rs1350298 |
| rs177077 | rs726652 | rs1035321 | rs294484 | rs176705 | rs1990985 |
| rs298032 | rs295965 | rs294494 | rs294485 | rs1156029 | rs1379297 |
| rs298033 | rs1307218 | rs722923 | rs294486 | rs1156028 | rs1817248 |
| rs298034 | rs1307217 | rs294495 | rs702544 | rs931857 | rs244569 |
| rs298035 | rs893190 | rs294496 | rs702543 | rs931856 | rs244568 |
| rs298042 | rs1111495 | rs294497 | rs159194 | rs931855 | rs244567 |
| rs298044 | rs295961 | rs294498 | rs40215 | rs1506557 | rs244565 |
| rs298045 | rs295960 | rs294499 | rs291118 | rs462930 | rs185417 |
| rs298046 | rs295959 | rs294500 | rs1506560 | rs458953 | rs258128 |
| rs298048 | rs295958 | rs294501 | rs37569 | rs174039 | rs258127 |
| rs298049 | rs296410 | rs294503 | rs291119 | rs2174624 | rs258125 |
| rs298050 | rs295957 | rs295936 | rs37571 | rs2135480 | rs1348710 |
| rs298051 | rs295956 | rs1395336 | rs1870077 | rs992726 | rs1348709 |
| rs298052 | rs295955 | rs1395337 | rs159195 | rs294474 | rs1971061 |
| rs298053 | rs295954 | rs294492 | rs37572 | rs294475 | rs1541673 |
| rs190936 | rs295949 | rs159196 | rs37573 | rs988827 | rs1541672 |
| rs298017 | rs295980 | rs159197 | rs167161 | rs988828 | rs258112 |
| rs298016 | rs295979 | rs172362 | rs37574 | rs1350297 | rs258111 |
| rs298015 | rs295978 | rs37579 | rs1506562 | rs1457110 | rs171800 |
| rs298014 | rs1154587 | rs721784 | rs291122 | rs1457111 | rs187716 |
| rs258110 | rs424839 | rs1118965 | rs35266 | rs255652 | rs26709 |
| rs258109 | rs370891 | rs154028 | rs39672 | rs255650 | rs26710 |
| rs258108 | rs434183 | rs151802 | rs958851 | rs255649 | rs28055 |
| rs258107 | rs444552 | rs244580 | rs244576 | rs2194210 | rs26711 |
| rs665836 | rs433565 | rs1457145 | rs244575 | rs255648 | rs27723 |
| rs392901 | rs1445918 | rs244579 | rs244573 | rs255647 | rs27185 |
| rs383444 | rs441817 | rs255812 | rs35258 | rs154221 | rs27695 |
| rs662643 | rs433161 | rs154029 | rs35259 | rs256752 | rs1445954 |
| rs670169 | rs428059 | rs185333 | rs40121 | rs256120 | rs27549 |
| rs525099 | rs434422 | rs35289 | rs35261 | rs255635 | rs455969 |
| rs669240 | rs427433 | rs35288 | rs35264 | rs185325 | rs26712 |
| rs381755 | rs391377 | rs35287 | rs40122 | rs26686 | rs1867711 |
| rs454702 | rs414746 | rs35286 | rs35265 | rs1031197 | rs1867712 |
| rs443191 | rs187368 | rs35285 | rs35255 | rs1031198 | rs26713 |
| rs380118 | rs244593 | rs35284 | rs721826 | rs27183 | rs26714 |
| rs2168649 | rs244592 | rs35283 | rs244570 | rs28044 | rs27547 |
| rs371775 | rs244591 | rs35282 | rs27171 | rs27182 | rs26715 |
| rs378970 | rs244590 | rs35281 | rs1824159 | rs545611 | rs27949 |
| rs401013 | rs181736 | rs35280 | rs27170 | rs649476 | rs26700 |
| rs427748 | rs193447 | rs35279 | rs27169 | rs1664896 | rs1306348 |
| rs427740 | rs2028842 | rs35278 | rs27168 | rs149106 | rs35309 |
| rs378869 | rs2028841 | rs40126 | rs2013979 | rs1374028 | rs27691 |
| rs1902609 | rs1823068 | rs35277 | rs889231 | rs531105 | rs35310 |
| rs389324 | rs1823067 | rs35276 | rs2014012 | rs27184 | rs26689 |
| rs387647 | rs1823066 | rs35275 | rs37353 | rs1445951 | rs27187 |
| rs377451 | rs244588 | rs40125 | rs187645 | rs1947090 | rs1445948 |
| rs403695 | rs168641 | rs35274 | rs1809012 | rs26708 | rs26687 |
| rs403672 | rs2059175 | rs244577 | rs187644 | rs2112959 | rs166260 |
| rs372309 | rs2059174 | rs35267 | rs153981 | rs1445953 | rs149506 |
| rs27722 | rs1664886 | rs1559251 | rs1553113 | | |
| rs26695 | rs1867724 | rs1345791 | rs1353748 | | |
| rs27773 | rs1445947 | rs1345792 | rs1498606 | | |
| rs1471429 | rs42470 | rs1345793 | rs1353747 | | |
| rs1471430 | rs1423308 | rs1105577 | rs1006431 | | |
| rs26705 | rs27174 | rs1960 | rs1948651 | | |
| rs28054 | rs168834 | rs1824788 | rs1498605 | | |
| rs26703 | rs27727 | rs1862563 | rs1498604 | | |
| rs27898 | rs27172 | rs1551939 | rs1498603 | | |
| rs722010 | rs676449 | rs1038080 | rs1995166 | | |
| rs27957 | rs27186 | rs997421 | rs1498602 | | |
| rs26702 | rs2112957 | rs1014317 | rs1077183 | | |
| rs27548 | rs1023814 | rs2059191 | rs1078368 | | |
| rs26701 | rs27175 | rs1551938 | rs1874857 | | |
| rs27188 | rs1445950 | rs1186170 | rs1874858 | | |
| rs27189 | rs2021384 | rs986067 | rs1909294 | | |
| rs149084 | rs736736 | rs954740 | rs1546221 | | |
| rs153968 | rs745813 | rs1363882 | rs2055295 | | |
| rs464787 | rs889229 | rs1353749 | rs1391648 | | |
| rs153978 | rs1077978 | rs1391651 | rs2055298 | | |
| rs464311 | rs2081106 | rs1391650 | rs1472456 | | |
| rs149108 | rs1559252 | rs1391649 | rs1553114 | | |
| rs153980 | rs2054443 | rs1391652 | rs1542842 | | |
| rs153961 | rs922437 | rs950446 | rs1498611 | | |
| rs1867725 | rs922436 | rs950447 | rs1532520 | | |
| rs153965 | rs922435 | rs1498599 | | | |
| rs153966 | rs922434 | rs1498601 | | | |
| rs1988803 | rs716908 | rs1498609 | | | |
| rs467300 | rs1971940 | rs1498608 | | | |

[0280] TABLE 12
New SNPs identified by deCODE

| Position | Variation | AA Change | Exon |
|---|---|---|---|
| 135641 | T/A | | |
| 142780 | A/G | | |
| 732790 | G/T | | |
| 735966 | C/A | | |
| 736226 | A/G | | |
| 736516 | C/T | | |
| 850001 | G/A | | |
| 852776 | A/C | | |
| 853079 | G/T | | |
| 853575 | C/A | | |
| 856468 | A/G | | |
| 860845 | A/G | | |
| 870924 | A/G | | |
| 1027267 | T/C | | |
| 1027643 | T/G | | |
| 1027757 | T/C | | |
| 1028146 | T/A | | |
| 1037657 | A/C | | |
| 1044016 | G/A | | |
| 1044045 | C/T | | |
| 1254737 | T/C | | |
| 1254849 | T/C | | |
| 1255763 | G/T | | |
| 1257206 | A/G | | |
| 1258161 | T/C | | |
| 1268007 | A/G | | |
| 1268187 | C/T | | |
| 1268553 | A/G | | |
| 1272669 | G/A | | |
| 1272910 | A/G | | |
| 1273023 | G/A | | |
| 1273220 | A/G | | |
| 1273240 | A/G | | |
| 1273543 | C/T | | |
| 1288439 | G/A | | |
| 1289730 | T/A | | |
| 1290176 | G/A | | |
| 1293745 | T/C | | |
| 1344605 | A/G | | |
| 1344864 | G/A | | |
| 1345135 | C/G | | |
| 1345286 | A/G | | |
| 1346112 | C/T | | |
| 1352976 | A/T | | |
| 1354291 | T/C | | |
| 1354377 | C/T | | |
| 1354554 | C/A | | |
| 1354675 | T/C | | |
| 1355114 | T/C | | |
| 1355693 | A/G | | |
| 1357081 | A/G | | |
| 1362985 | T/G | | |
| 1363021 | C/T | | |
| 1363827 | C/T | | |
| 1363911 | G/A | | |
| 1364061 | C/T | | |
| 1364066 | T/A | | |
| 1367904 | A/G | | |
| 1368193 | T/C | | |
| 1368217 | G/C | | |
| 1373349 | C/T | | |
| 1373384 | A/G | | |
| 1373415 | T/C | | |
| 1373979 | T/G | | |
| 1376149 | G/A | | |
| 1384931 | A/C | | |
| 1385093 | A/T | | |
| 1385107 | G/A | | |
| 1385445 | T/C | | |
| 1391418 | G/C | | |
| 1409210 | C/A | | |
| 1414804 | C/T | | |
| 1428284 | T/C | | |
| 1431800 | A/T | | |
| 1449904 | A/T | | |
| 1574301 | C/G | | |
| 1574615 | C/T | | |
| 1575634 | A/T | | |
| 1580088 | G/A | | |
| 1581078 | G/A | | |
| 1582418 | T/A | | |
| 1584580 | A/C | | |
| 1585955 | G/T | | |
| 1590608 | T/C | | |
| 1590672 | A/G | | |
| 1590673 | G/T | | |
| 1590837 | G/A | | |
| 1590936 | C/A | | |
| 1591011 | G/A | | |
| 1591047 | C/T | | |
| 1591306 | C/A | Pro->Thr | D1 |
| 1591583 | T/C | | |
| 1594788 | C/A | | |
| 1594994 | G/A | | |
| 1601831 | C/T | | |
| 1636902 | T/C | | |
| 1638550 | A/C | Lys->Thr | exon 4 |
| 1640663 | T/C | | |
| 1641954 | C/T | | |
| 1641960 | C/T | | |
| 1653881 | G/A | | |
| 1655748 | G/A | | |
| 91470 | G/A | | |

Discussion of Example 2:

[0281] Here we present the first complete genomic sequence of human PDE4D, two novel mRNA/protein isoforms of PDE4D and their corresponding exons, and the intron-exon structure of known and novel isoforms. The basis for phosphodiesterases is the mammalian homolog of the “dunce” gene in Drosophila melanogaster, implicated in learning and memory (Davis, R. L. and B. Dauwalder, Trends Genet., 7(7):224-229 (1991)). PDEs are members of a large superfamily of isoenzymes subdivided into 9 and possibly 10 distinct families (Conti, M. and S. L. Jin, Prog. Nucleic Acid Res. Mol. Biol., 63:1-38 (1999)), with several genes in each family and more than one isoform for each gene. The significance of the diversity of PDEs is not known but many of the isoforms differ in their biochemical properties, phosphorylation, intracellular targeting, protein-protein interactions and patterns of expression in tissues, which suggests that each of the various isoforms might have distinct functions (Bolger, G. B., Cell Signal, 6(8):851-859 (1994); Conti, M., et al., Endocr. Rev., 16(3):370-378 (1995)).

[0282] There are four genes that encode the type 5 PDEs (PDE4A, PDE4B, PDE4C and PDE4D), which is a group of enzymes characterized by high affinity for cAMP. The gene for PDE4D was assigned to human chromosome 5q12 (Milatovich, A., et al., Somat. Cell Mol. Genet., 20(2):75-86 (1994); Szpirer, C., et al., Cytogenet. Cell Genet., 69(1-2):22-14 (1995)) and 5 distinct splice variants have been characterized (the short forms PDE4D1, PDE4D2 and the long forms PDE4D3, PDE4D4, and PDE4D5) (Bolger, G. B., et al., Biochem. J., 328(Pt. 2):539-548 (1997)) (FIG. 3). The sequence of the human PDE4D variants show a high degree of homology to the PDE4Ds expressed in mouse and rat. The pattern of splicing and different promoter usage is highly conserved during evolution indicating an important physiological role (Nemoz, G., et al., FEBS Lett., 384(1):97-102 (1996)). The PDE4D variants are generated at two major boundaries present in the gene. The first boundary corresponds to the junction of exon 2. Differential splicing in this region generates the 2 short variants PDE4D1 (586 a.a.) and PDE4D2 (508 a.a.) (FIG. 3). This splicing boundary is conserved in mouse, rat and between different human PDE4 genes. The splicing variant PDE4D2 is generated by the removal of 256 bp from the PDE4D1 sequence. The initiation codon in the PDE4D2 variant lies within exon D1/D2. Data demonstrates that the expression of the short PDE4D variants is under the control of an internal promoter regulated by cAMP (Vicini, E. and M. Conti, Mol. Endocrinol., 11(7):839-850 (1997)). The second major splicing boundary is also conserved during evolution and is identical to that described in the Drosophila dunce gene. Splicing occurs at the intron/exon boundary at the LF1 exon (FIG. 3).

PDE Function

[0283] The PDEs serve at least four major functions in the cell. They can (1) act as effector of signal transduction by interacting with receptors and G-proteins; (2) integrate the cyclic nucleotide-dependent pathway with other signal transduction pathways; (3) function as homeostatic regulators, playing a role in feedback mechanisms controlling cyclic nucleotide levels during hormone and neurotransmitter stimulation; (4) play an important role in controlling the diffusion of cyclic nucleotides and in creating subcellular domains or channeling cyclic nucleotide signaling (Conti, M. and S. L. Jin, Prog. Nucleic Acid Res. Mol. Biol., 63:1-38. (1999)). Inhibition of PDE has long been recognized as an effective pharmacological strategy to alter intracellular cyclic nucleotide levels (Flamm, E. S., et al., Arch. Neurol., 32(8):569-71 (1975)).

[0284] It has been reported that PDE4 is the predominant isozyme regulating vascular tone mediated by cAMP hydrolysis in cerebral vessels (Willette, R. N., et al., J. Cereb. Blood Flow Metab., 17(2):210-9 (1997)).

[0285] A recent study on mice with targeted disruption of PDE4D gene (Hansen, G., et al., Proc. Natl. Acad. Sci. USA, 97(12):6751-6 (2000)) has demonstrated a crucial role of PDE4D in the control of smooth muscle contraction and muscarinic cholinergic receptor signaling but not in the control of airway inflammation. The lung phenotype of the PDE4D−/− mice demonstrates that this gene plays a nonredundant role in cAMP homeostasis. There is a significant reduction in PDE activity and an increase in resting and stimulated cAMP levels in the lung, indicating that other PDE4s (or other PDEs) are not up-regulated and cannot compensate for the loss of PDE4D. These findings support that PDE4D serves a unique, nonoverlapping functions in cell signalling.

[0286] No clear link between an established inherited disorder and known PDE loci has emerged, with the exception of PDE6. Inhibitors of PDEs have been shown to affect airway responsiveness and pulmonary allergic inflammation (Schudt, C., et al., Pulm. Pharmacol. Ther., 12(2): 123-9 (1999)). There are reports suggesting that altered PDE4 function may be linked to nephrogenic diabetes insipidus (Takeda, S., et al., Endocrinology, 129(1):287-94 (1991)) or atopic dermatitis (Chan, S. C., et al., J. Allergy Clin. Immunol., 91(6):1179-88 (1993)), however no mutations have been identified. It has also been reported that vasorelaxation modulated by PDE4 (not mentioned whether it is A, B, C or D gene family) is compromised in chronic cerebral vasospasm associated with subarachnoid hemorrhage (Willette, R. N., et al., J. Cereb. Blood Flow Metab., 17(2):210-9 (1997)). PDE4D itself has not been linked to stroke before.

PDE4D Expression and Cellular Localization

[0287] PDE4Ds are expressed in human peripheral mononuclear cells (Nemoz, G., et al., FEBS Lett, 384(1):97-102 (1996)), brain (Bolger, G., et al., Mol. Cell Biol., 13(10):6558-71 (1993)), heart (Kostic, M. M., et al., J. Mol. Cell Cardiol., 29(11):3135-46 (1997)) and vascular smooth muscle cells (Liu, H. and D. H. Maurice, J. Biol. Chem., 274(15):10557-65 (1999)).

[0288] Immunoblotting of rat brain has shown that the PDE4D3, PDE4D4 and PDE4D5 proteins are present in brain (Bolger, G. B., et al., Biochem. J., 328(Pt 2):539-48 (1997)) and are expressed in cortex and cerebellum from rat (Iona, S., et al., Mol. Pharmacol., 53(1):23-32 (1998)). These proteins were recovered mostly or exclusively in the particulate fraction suggesting that these forms may be targeted to insoluble cellular structures. In addition a 68 kDa protein was detected which could represent PDE4D 1, PDE4D2 or both. To verify this RT-PCR was performed on mRNA from rat brain and the results showed that transcripts for PDE4D1 and 2 were present. Their data also suggests that the N-terminal regions of the PDE4D3-5, derived from alternatively spliced regions of their mRNAs, are important in determining their subcellular localization activity and differential sensitivity to inhibitors and there are indications that there is a propensity for the long PDE4D isoforms to interact with particulate fraction of the cell.

### Example 3

### PDE4D Isoform Expression

Expression Analysis in EBV Transformed B Cell Lines

[0289] As a functional mutation in the known coding exons of PDE4D was not identified, gene expression was next studied to determine if the genetic association to stroke relates to regulation of its expression levels. In order to test this, we chose to use cell lines instead of blood or tissues for these studies because expression analysis of cell lines is not confounded by the presence of multiple cell types. Cell types may express PDE4D at different levels so it is generally more reliable to quantify expression in cell lines than tissues. Isoform-specific kinetic PCR analysis was carried out on EBV transformed B cell lines to quantify each isoform in 83 stroke patients and 84 controls. These patients were not selected for this analysis based on any specific subtype of stroke. The majority of the patients had ischemic stroke and 38% of them had carotid or cardiogenic cause of stroke. Overall the total PDE4D message level as assessed by amplification across exons present in all isoforms (PAN), was significantly lower in patients than in controls (p value<0.005). This decrease was due primarily to lower expression of the isoforms, PDE4D1, PDE4D2 and PDE4D5 (FIG. 4).

[0290] We selected individuals with a specific stroke associated haplotype and compared the expression levels of carrier vs. non-carriers of this haplotype and with patients and controls examined separately (FIGS. 5 and 6). The haplotype was constructed out of the at-risk allele for the microsatellite marker AC008818-1 and SNP45 (SNP5PDM357221) and SNP41 (SNP5PDM361545). This haplotype acts as a surrogate for the disease-associated haplotype we have identified in LD block B (Table 3). Patients with the haplotype had a significantly decreased expression of the PDE4D7 and PDE4D9 isoforms (FIG. 5). Several other isoforms of PDE4D were expressed but did not show correlation to the disease haplotype. The PDE4D7 correlation was also present in controls but only marginally significant (FIG. 6). Of interest, this at-risk haplotype covers the 5′ exon specific to PDE4D7 and presumably its promoter.

[0291] These results show that there is significant disregulation of the expression of multiple PDE4D isoforms in stroke patients.

Methodology for Expression Analysis Using Quantitative Reverse Transcriptase PCR

[0292] Total RNA was isolated from EBV transformed B-cell cultures according to manual, using the TRIZOL® reagent provided by GibcoBRL. RNeasy mini Qiagen kit with on column DNA digestion was used to clean RNA. Quality and quantity of RNA was assessed using 2100 Agilent Bioanalyser. cDNA was prepared from total RNA using random hexamers with TaqMan Reverse Transcription Reagents kit from Applied Biosystems (N808-0234). Primer Express 2.0 and Oligo 6 software were used to make cDNA specific primers and probes for PDE4D and PDE4D isoforms. GAPDH “Assay-On-Demand” was obtained from Applied Biosystems and used as a housekeeping gene. PDE assays were tested and optimized for 384 well high throughput expression analysis using ABI 7900 Instrument. A final concentration of 200 nM probes, 900 nM primers and 2 ng/mcl cDNA was used in a 10 mcl reaction volume. Each plate was run twice and an average for each sample calculated. ABI7900 instrument was used to calculate CT (Threshold Cycle) values. Samples displaying a greater than 1 deltaCT between duplicates were not used in our analysis. Quantity was obtained using the formula 2^{-ΔCT} where ΔCT represents the difference of CT values between target and housekeeping assay.

[0293] Accession numbers AY245866 (PDE4D7) and AY245867 (PDE4D9).

Discussion of the Three Examples and Conclusions:

[0294] Our results indicate that genetic variation in the PDE4D gene is associated with ischemic stroke. The direct involvement of PDE4D is strongly supported by linkage in conjunction with association and expression analysis. We first identified the association using microsatellite markers, and supplementing the microsatellite data with a denser set of SNPs further supported this. The strongest association is to the two ischemic subtypes, carotid and cardiogenic stroke whereas we did not observe association to small vessel occlusive disease, the form of stroke thought to be independent of atherosclerosis. Although we have not identified a functional mutation in the PDE4D gene, we have identified a haplotype, that extends over the first exon of PDE4D that is significantly associated to carotid and cardiogenic stroke. This haplotype is present in 47% of the carotid/cardiogenic stroke patients, compared to 21% in the control group with more than two-fold stroke risk for the carriers of this haplotype. It has a population attributed risk of 25%. For the combined cardiogenic and carotid subtype of stroke, apart from finding individual SNP and microsatellite alleles that are significantly associated with the disease even after adjusting for multiple comparison, most interesting is the discovery that haplotypes covering the first exon of PDE4D can be classified into three groups with clearly distinct risks. Relative to the protective group, the population attributed risk of the at-risk and wild type groups combined is estimated to be 55%. Approximately 16% of the population carries one copy of the at-risk haplotype in FIG. 12.3. They have about 1.8 times the risk of the general population for getting cardiogenic or carotid stroke. Approximately 0.8% of the population is homozygous for the at-risk haplotype and, assuming the multiplicative model, their risk is estimated to be about 3.8 times the risk of the general population. It is true that we have not yet identified or proved convincingly what is the functional variant, or variants, which are responsible for the observed effects of these haplotype groups. And, since these haplotype groups do not fully explain the linkage signal we observe in the region for all stroke patients, we certainly could not rule out, and indeed expect, that there are other variants/haplotypes within PDE4D not directly related to those we have identified that confer risk to stroke. These are likely to be rare but could have very high penetrance. We also cannot rule out the possibility that some other genes in the linkage region independent of, or in conjunction with, PDE4D confer susceptibility to stroke.

[0295] We examined whether the disease associated alleles and haplotype are related to specific stroke risk factors such as hypertension, hypercholesterolemia, diabetes, peripheral artery occlusive disease and coronary artery disease in addition to each onset of stroke and gender (Table 8). A marginally significant association to hypercholesterolemia was observed but it is clear that PDE4D's contribution to stroke is not strongly correlated with any of these known risk factors.

[0296] The PDE4D gene is a highly complex gene. By alternative splicing and use of different promoters this gene generates at least 8 different isoforms that yield functional proteins, differing from each other in their N-terminal regions. We have identified four new exons encoding the N-termini of two new isoforms PDE4D7 and PDE4D9. The disease-associated haplotype extends over the 5′exon unique to the new PDE4D7 variant and the presumed promoter region of this isoform suggesting that the functional variation may be involved in transcriptional regulation. This hypothesis is also supported by our PDE4D expression analysis that shows significant correlation between the disease associated haplotype and the level of PDE4D7 message.

[0297] The strongest association found for this PDE4D haplotype was to the two major subtypes of ischemic stroke, carotid and cardiogenic stroke, suggesting a role for this gene in the vascular biology of atherosclerosis. While there are multiple etiologies for ischemic stroke, atherosclerosis remains the most important one and it is the major pathological process for the two ischemic subtypes, carotid and cardiogenic strokes. First, it is the major cause of stenotic and occlusive lesions of the internal and common carotids that lead to carotid strokes. Second, cardiac thrombi which shed emboli to the brain most commonly occur on the background of coronary artery disease, such as following acute myocardial infarction or ischemic cardiomyopathy, and/or due to atrial fibrillation on the basis of poor compliance of ischemic ventricles (diastolic dysfunction/stiffening). Although atrial fibrillation may occur on the background of other diseases such as valvular disease, hyperthyroidism, and hypertension, in the age group that tends to suffer from stroke, ischemic heart disease remains one of the most important causes. Ischemic stroke resulting from occlusion of small penetrating arteries within the brain (small vessel occlusive disease or lacunar stroke) is generally thought to result from endothelial proliferation since atherosclerosis only occurs in larger arteries. PDE4D does not show association to small vessel stroke, consistent with its role in atherosclerosis. Carotid and cardiogenic stroke together account for the majority of ischemic stroke (note that our number for carotid is lower since we used a more stringent cutoff of stenosis).

[0298] PDE4D selectively degrades second messenger cAMP (Kong, A. et al., Nat Genet 10, 10 (2002)), which plays a central role in signal transduction and regulation of physiological responses. It is expressed in most cell types important to the pathogenesis of atherosclerosis, including vascular smooth muscle cells (VSCM), endothelial cells, monocytes, macrophages and T-lymphocytes (Houslay, M. D. and Adams, D. R., Biochem J 370, 1-18 (2003); Liu, H. and Maurice, D. H., J Biol Chem 274, 10557-65. (1999); Liu, H. et al., J Biol Chem 275, 26615-24. (2000); Baillie, G., et al., Mol Pharmacol 60, 1100-11. (2001); Jin, S. L. and Conti, M., Proc Natl Acad Sci USA 99, 7628-33. (2002)). Cyclic AMP is a key signalling-molecule in these cells (Landells, L. J. et al., Br J Pharmacol 133, 722-9 (2001); Fukumoto, S. et al., Circ Res 85, 985-91. (1999); Ogawa, S. et l., Am J Physiol 262, C546-54 (1992)). In VSMC, low cAMP levels lead to an increase in proliferation and migration that at least in part is mediated by PDE4 (Landells, L. J. et al., Br J Pharmacol 133, 722-9 (2001); Stelzner, T. J., et al., J Cell Physiol 139, 157-66 (1989); Pan, X., et al., Biochem Pharmacol 48, 827-35. (1994)). Animal models have also shown that elevation of cAMP reduces neointimal lesion formation and inhibits proliferation of SMCs after arterial injury (Palmer, D., et al., Circ Res 82, 852-61. (1998); Indolfi, C. et al., Nat Med 3, 775-9. (1997)). In monocytes and T-lymphocytes, accumulation of cAMP is generally associated with inhibition of immune functions such as proliferation and cytokine secretion (Indolfi, C. et al., J Am Coll Cardiol 36, 288-93. (2000)). It is attractive to postulate that the regulation of cAMP through absolute or relative expression of one or more PDE4D isoforms may differ in individuals susceptible to stroke; some stroke patients may have increased PDE4D activity and, consequently lower cAMP levels in any of the above cell types, leading to development of the atherosclerotic plaque and/or its instability. However, contrary to what one might expect we see decreased expression in some of the PDE4D isoforms in EBV cell lines from stroke patients. It is of interest that these isoforms are all up regulated by cAMP (Liu, H. and Maurice, D. H., J Biol Chem 274, 10557-65. (1999); Tilley, S. L., et al., J Clin Invest 108, 15-23(2001); Vicini, E. and Conti, M., Mol Endocrinol 11, 839-50 (1997)) suggesting disregulation at the level of cAMP in patients. It is therefore possible that increased activity of one or few splice variants alters the effective PDE4D enzymatic activity of the cell decreasing the cAMP levels thus altering the expression of cAMP regulated isoforms as observed in our expression study. This relative expression of PDE4D isoforms may determine the compartmental localization of PDE4D isoforms and thus the corresponding gradients of intracellular cAMP that have been recently observed (see Housley review).

[0299] In summary, we have presented association analyses (single marker and haplotype analyses) that support the notion that the PDE4D gene confers risk to ischemic stroke. Furthermore, we have observed significant disregulation of multiple PDE4D isoforms in stroke patients. We propose that this gene is involved in the pathogenesis of stroke through atherosclerosis. PDE4D is expressed in cell types important in atherosclerosis and regulates a second messenger with a central role to processes important in the pathogenesis of atherosclerosis. Inhibition of PDE4D in general or specifically one or more isoforms, by a small molecule drug or other pharmacological agent might decrease the risk of stroke in general, and especially those who are predisposed to stroke through variation in the PDE4D gene.

[0300] While this invention has been particularly shown and described with reference to preferred embodiments thereof, it will be understood by those skilled in the art that various changes in form and details may be made therein without departing from the spirit and scope of the invention as defined by the appended claims.

The application's sequence listing, which the Patent Office published only in electronic form, follows.

SEQUENCE LISTING (102 sequences)

SEQ ID NO: 1 - DNA, 1691140 bp, Homo sapiens
  misc_feature (1)...(1691140): n=A,T,C or G
cattttttgaaagaacatctgaaagacaaaatggggaatggcgagtctgtctaataaaccattttgagaaaactggatattcatataaagaagtataaagaggactgttatgttgcacaatacacaaaaatcaactcaaaataaattaatgacctaaacttaatatcagaaatgatgaaacttttaaaagaaaacatagggtgaatgtatgtttagggaaactcaaatttatgttcacaggttgcaaaaagaaaaatatgagaaaaacatagaggaaaatgattctgccaataaagtgagttggaaataatttttctgttttcacaaaaatcattgctaacaaaagcaaaaacaagtgtgggactatagaaaactgatgagcttctgcataggaaagaaaagaatgaaccaatacagaaggcatccagtagattgggacaaaattatgggggattatatatctgaaagggttgttatctaacatgtataagaaattaccactactaagtaggaaaaacaacaacacaaaacaacaaataaccagatggaaattgggcaaagaacctgaatagatgtttctgaatagaagacatgaatttgactaccaggtaaaagaaaaggttctcaacatacctaatcatcaagaaaatgtacattaaaactcactgagatatcttctccactctaattggaattaatgttacaaaaaagaaacaaattttttacaatgaaatgatcagtgtggagttggatgaaggggtactattacactactacacagtgtagggtggaatttaagtcagtatacacactatgaaaaatagttggagtttgctcaaaaaataaaatacaactatcatttgctgtagtaatcccaccactgaatatacattttaagaaaatgaaatcagtatattgaagagatacgtgaaatcctacatttcttgacacattattcacagcactcaagatgtggaatcaacctacctgtccaggaacagatgaagagataaagaaaatgcagtgtgtatacacagtggaatgctcttcaccataaaaaattcacggaatcatgtcattgcagcaacatggtggacaatgtaagaaaagctccccggagaagctgtacagaagctgcctcctcagcagtcagggccagggaccggagctgtttttaccccaggacagggccggccccaagtcatcccagagctgccatggcaccccctcagtcgggtcctgaggaatcctacacaagctacttatatcagtgatcactaggataatccatagaacttttgggaaagaagtttaagacctttctcccaccatttcagcaggataaattccaactggattagaaaatgaaatgttaataatgcaaataagtacatatttatatctgtatataaaatacagttgatatttgcctggtgtttaggtgtctaaaggactttctaagcataaaagcaaaaaaaagtcataaaaatgctatagcagtttgagactctatgcaggaaagggcatcatcacgtgcatggatgaatctgtatctaattttaaacaatttccaatggtgcctgtttccttttctttgaaaatctctggagaaatagttcctcttgctgtgtctttctttaggcaagaatttttactaattgatgtgtagtctgaatcctggctaagtataaaccttttattttttatacctgttcttagtgaaaatgaaactgtgactttttttttaattccttttgttggtcaaaaactacaattaactcttctgagtttcttctctggctgaacaaacaatggtcccattggcctttcagggaactccaggccgtctcaaaaaccttcatgtttcatttcttttcagagctcccaaaaagaatagcttgctcttgacgttgtacatgttagtggaatgatcaggactactttgcaaagatgaaaaatttgtgtttctagtgatttgaaaatagaaatctgatgtaactattagatattgggaaagaaggtgacgaaggtaggtatcaccgaaagcacttaacaattctgaataattctgtacttgattgcatttatgtgtatcataggaacagttgggtttccttgagtgttaaattatttattcacttattccacttcaagccagctaaatgattgtttccctgatggcaaaagtctcagattgattgcacagtttatttggttggattgtttatgctctttttattatttattcttatttcaccaatgaaaatatcactaagttctttggtttgttgacctgattgtacctactttgacaaatcactgcctttctggacccagttttctcattaagtggcagtgataacctgtcatacttacagatataaaaacatgaaagttaaagtattgggtaatactttcctcctatcttttttttattttgaaaaagataaaaaattggcataatgtattagttaagatggaataatcatatgttgatatccagccatttcttctctcaaatgataggaagatttttatgtgaaactacttgtgagagatcttaacaatttgtagttagagaaagcactattatatcatttggaaatgcaagaaacaagttacctttggggcaacagaggcccttgtcattttctcaaaagaaggaagcatcagcattttgatgatgatgttgagattgtagaaatgatgaaggtgaaaaagttattctagcttatgtttagcaaaatgaaatgaacccaaataataaaacagttacaacattgaatctctttgggagaaaaaaaaaagatagaatgctaatgtccttcagaacttcttaaaccagaaccttaaaaaaaagagaagcttttaaaaaatcataatagtttatgatcttgaagggtttaaaagtatttgatgaagatgtcttttgaatttatttgtaggtcttcttgtgtatttaaaagctaagttatcttgtaatcatttttttctatacctttgtcagtaacctcttagtgatgaaataaaaaagattaggtaatcatccagcaatggggaagaagttaaggaacaaagagctcagattaaactagtttttagaatctaagcatttctgcatgaatttgaatcatggaaaacaaaatgtagcactccaacatttgatgcaaaactaaaagtggaatactgctttgatatttgaatgaattgaaaaataattaacatccttggaactgtatgtaaagaaggacttcacaagtattatagatacccccaacctcagcccttttcccatgtatctctttgatcacatccctacctcatagatcacccatgtgctgaagactttcagttctgtatcttcattctagatctcctgaactcaagatcagaatatctttctgacttctgactgtgtatttctggatgttatacaagaacctcagctcaaactcagtattccctaaaccattgtttttgaaactttatgttggatgtgaaatctgtattgtagaataacattaaaaaaagaaagaatagtatgcaaaatatcagagtgcattgtatgtagcaagagtaggtattttcgtaaactttttgttttaattaaacacatatatatttattattgcagtgtaaaatgtatttcttaatttggataagtgttagtgaggatgtggataaattggaactcttgtacattactggtgggactataaaatggcactgccgtttggtaaaacagtttggcagttcctcaaaaagttaaacatacagttaacatgtgatatagaaatttcacttttagatgtacacccaaaagaattgagaacatatgttcacacagcaacttgtacacaaatgttcatagcagcattactcagaagagccaaaaagtggaaacaactgaaatgtccatcaagtgatgaagcagtaaaatgtagtatatccgtacaatgaaatattcagccataaaaaggaatgcaatgttgttgcatgctacaacaacttggatgaatcttggaaacattattctaagtaaaagattccatttttatgaaatgtccagaataggcaaatctatagagacaaagataagtggtttccaggggttgtggggaggagagaatgggaaggtgacaaaatgttctggattagataatagggatgggtataacttagtgactatacaaaaaaaatcactagaatcatatactttaaaaaagatattcccataaaaaaaagaacaagcaagaaaaaataactaaatttgactttaggagttaaaaagaatatagtatctcaaatgaaaattttgctggataggattaggggtagattagacactccagaagttaaagatcagtgagcttgaatacacacaatagaagctagtctaaacaaagcacagagagaaaaaagaacaaaacaaacctcccacaacaaaacaaaacaaaagccaaccaaaaatacagcctcaatgacctatgggaaatatttagcagtctaatatacatgtaattggaatccctgaaggaggaggggggtagaatgtatctttttttgtcccctatgactgctgttaagattttattattgatttttaggaattgcattatatcttggtgtggttgtttaaacagaggtatagcttatcaaccaatggtggagctaaaatagaatacttgaaagtacttatggatgcacagaatctaagatggcccccaattttcctgctaccttgtacccttgagtatatgtgggacctgttacttgcttctaaccaataaaatctcacaccagttagaatggtgattattaaaaagtcaggaaacaacggatgctggagaggatgtggaaaaataggaacgcttttacactgttggtggaagtgtaaattagctcagccattgtggaagacagtggcaattcctcaaggatctagaactagaaataccatttgacccagccatcccgttactgggtatataaccagaggattataaatcattctactataaagacacatgcacacgtatgtttattgcggcactgttcacaatagcaaagactcggaaccaacccaaatgtccatcagtgatagactggatgaagacaatgtagcacatatacaccagggaatactatgcagctataaaaaatgacgagttcatgtcctttgcagggacatggatgaagctggaaaccatcattctcagcaaactatcacaagaacagaaaaccaaacaccacatcttctcactcataagtggcagttgaacaatgagaacacatggacacaaggcagggaacatcacacaccggggcctgtgtggggggtcgggggcagggggagggatagcattaggagaaatacctaatgtagttgacattactttggtttgacattactttggtttgtgggtgccacaaaccaccatggcacatgtatacctgtgttacaaacctgcacgttctgtacatgtaccccagaacttaaagtataataataataaaataacatgtatgtcaagggtgacatgtaattaagcaaagctcagtaaatttaaaatgattgaaattgtactaagttttctgaccacgctagaattaagctagaactccaggtccagatggcttactgatcaattttacccaacactttggaatgaataatgacatttgtatgaaagtcctttcagaaaatagaagatgagggaatatttcctgaaccattttatgaggccagtattgacatgggtaataaaaccaacaaatacattacacaaaaaaattgtagcacatgatatccctgataaaaccaaatgcaaaaatacattaaatttgcaaattgaatgcagcagtagataaaaaggacaataatacatcatggccaagtagggtttatcccagcaaggtaagactggtttaacatctaaaatcaatcagtataattcatcatatcgataggatgaaggaaaaaaactcatgtgaccatctcaacgattgcagaaaatgtatgtgacaatattcaacacccattaatgataaaaatgttaaatacattacaatagaagaaaacttcctcagccttatcaagggtacctgtgagaaaattatggataacatttttcttaatggtggtagactgaatgctttcccctatggtcagaaaaagacaaaactcatcactgctatacaacatttcatgagaggtcagcagtgctttcatgccttaaaggcatgaaaatgaaataagtgatttaagattggaaagaagaactaaaactacgtttgctgatatcaaaaatcccaagaaatctgcccccaaaaagcacttatgaattaataattaaacttaacaaggaagcaggatataagaccactgtataaaaatcaattggaaaactaaaacaaaaccccaaaaaacccaacctaataatctgtttccaataacaccaaaaaacatggaatactcagggatgaattataagtagggataaacaaggtgtgtgcaagacctgacaatgaaaactattaaatgttgttgagaggaactaaggatgacttaaataactggagagacatactatgttcatggactgaaagatatgcaatattgataagatgtcaattcttccaaaattgatacatggattatttagcttggtaaaaatccaagcttttttttgtagagttttcaagcattttgtaaaatttatttggaaatacaaataatctgaatagccaaaacaatgtggagaaaaggagaaaaaattagagaacttacattacctgtttttaagacttactataaaatcttactttcaggtgtggtattggtatcttactgtaaagtcttcctgtaaagtatattgatatttagtgtggtgttggcataaggatagatatttaggcctatggaatagaatagagggtccaatagtagattcatgtatctgtagtcaagtgattttcagcaaagaagccaagggaagggatcatcttttcagggtagtgttggaacaactggatatctattatggaaaaagtgaacctttatactgtatactgtatgcactcaaattttactttggactggatcacagattcaaatataatagagatatctaaaaaccttccaaaagaaagtataggagaaaaattcttgcaattttgcatagacaaagatatcttagttcctagaaaacataaccataaaataaaaattacatcaaatagacttcatcaaaattggaaatttctactctttgaaatatactgttaagaaaatgaaaagacaagaaaattcccattacatagctcacaaaatacttataactaggatatgtagagaacacttcaatactaagacaatgcaataaaaaaacaaaaaaactggacacaacaagaatatatatgaaatactcataagcacatgaaaagattattaacatcattaatcatacaggaaatgcagattaaaaccacaacgagatactaccatgtacacactaaaatggctaaagccaaagacactgacataaatttttggtgagtgtggggctcctggagccctcagacattgctgataggactgtgaaatgacacagccactttggaaaatgagttcatcatttctaactaagttaaacatacacataccttaatttcattcctaggtatttatctaagggataagaacacatgtgttcacacaaattgtgtggtgttcatagcagctttattcataatatcaaaacattggaaacaatctacatgtctatcagcaagtgaatggaaaaatattttgtagtatatccatgcaatgaaatattacccagcaataaaaataaactatgggtacatacaacaatataaatgaatctcaaaaatatgccgagtgataaaagccattctggttccatttacatgaaattctaggaaaggggaatctatggaggcagaaagcaggtcagaggttgctttggtctaggggatcgagaggccttactgccaaacagcaccagtagattctttgggggggcggaagagttttatattttcattgttgtgctgtttacatggggatatgcatttgtcaaaactcactgagctctacatttaaaatgggtacatttttgtagtattttaattataaatcaaaattgaacaaaaaagtaacacatgttatttgaggacttttttttttaaagcatcatgttttatttttattttttgcagacaagggttttatttaatataactcataaattacattgccaatatcctaaaggtaataaagaagtcaaaagcactatttgtgaaaatcagtatatcatatgacggtaagcatagttgctattcaccaaaaacgttcagaaaacatttgaattcattgtctgaaagagcttaggctcaagacttgaattactaagaaaagaaagtagtatataattatacaaagatgagtaataaccaaaaactgttctttaatgcatgtttgtttttcctgaaagccatttctttctttttttcttttaatactttaagttctagggtatactttaagttctagggtacatgtgcacaacatgcagatttgttacatatgtatacatgagccatgttggtgtgctgcacccattaagtcgacatttacattaggtgtgtctcctaatgctatccctccccactccccctaccccaggacaggccccggtgtgttatattcccctttctgtgttcaagtgttctcattgttcaatgagtgagaatatgaggtgtttggttttttgtccctgcgatagtttgctgagaataatggtttccagcttcatccatgtccctacaaaggacatgaactcatccttttttatggctgcatagtattccatggtgtatgtgtgccacattttatttttatttttattatttttatttttaaaattttattattatactttaagttagtgtacatgtgcacaacatgcaggtttgttacatatgtatatatgtgccatgttggtgtgctgcacccattaactcgtcatttaacattagatatatctcctaatgctatccctccccctaccccgaccccacaacagtccccggtgtgtgatgttccccttcctgtgtcaatgtgttctcattgttcaattcccacctatgagtggcaacatgtggtgtttggttttttgtccttgagatagtttgctgagaatgatggtttccagtttcatccatgtccctacaaagcacatgaactcattatttttcatggctgcatagtattccgtggtgtatagtgccacattttcttaatccagtctatcactgatggacatttgggttggttccaagtctttgctattgtgaatagtgcctcaataaacatacgtgtgcatgtgtctttatagcagcatgatttataatcctttgtgtatatacccagtaatgggatggctgggtcaaatggtatttctagttctagatccttgaggaatcgccacactgtcttccacaatggttgaaccagtttacagtcccaccaacagtgtaaaagcattcctatttctccacatcctctccagcacctgttgtttcctgactttttaatgatcgccattctaactggtgtgagatggtatctcattgtggttttgatttgcatttctctgatggccagtgatggtgagcattttttcatgtgtcttttggctgcataaatgtcttcttttgagaagtgtctgttcatatccttcgcctacttgttgatggggttgtttgtttttttcttgtaaatttgttcgagttcattgtagattctggatattagccctttgtcagatgaatagattgtgaaaattttctcccatcctgtaggttgcttgttcactctgatggtagtttcttttgctgtgcagaagctctttagtttaattagatcctgtttgtcaattttggcttttgttgccttgcttttggtgttttagacatgaagtccttgcccatgcctatgtcctgaatggtattgcctaggttttcttctagggtttttatggttttaggtctagcatttaagtctttaatccatcttgaattaatttttgtataaggtgtaaggaagggatctagtttcagctttctacatatggctagccagttttcccagcaccatttattaaatagggaatcatttccccatttcttgtttttgtcaggtttgtcaaagatcaggtagttgtagatatgtggcattatttctgagggctctgttctgttccattggtctatatctctgttttggtaccagtaccatgctgttttggtgactgtagccttgtagtatagtttgaagtcaggtaccgtgatgcctccagctttgttcttttggcttaggattgatttggtaatgcgggctcttgtttggttccatatgaactttaaagtagttttttccaattctgtaaagaaagtcattggtagcttgatggggatggcattgaatctataaattaccttgggcagtatggccattttcacaatattgattcttcctacccatgagcatggaatgttcctccatttgtttgtatcctcttttatttccttgagcagtggtttgtagttctccttgaagaggtccttcacatcccttgtaagttggattcctaggtattttattctgtttgaagcaactgtgaatgggagttcactcgtgatttggctctctgtttgtctgttattggtgtataagaatgcttgtgatttttgcacattgattttgtatcctgagactttgctgaagttgcttatgagcttaaggagattttgggctgagacgatggggttttctagatatacaatcatgtcatctgcaaacagggacaatttgacttcctcttttcctaatcgaataccctttatttccttctccttcctgattgccttggcaagaacttccaacactatgttgaataggagtggtgagagaggacatccctgtcttgtgccagttttcaaagggaatgcttccagtttttgcccattcagtatgatattggctgtgggtttgtcataaatagctcttattatttggagatacatcccatgaatacctaatttattgagagtttttagcatgaagggctgttgaaatttgtcaaaggccttttctgcatgtattgagataatcatgtggtttttgtctttggttctgtttatatgctggattacgtttattgattttcatatgttgaaccagccttgcatcccagggatgaagcccacttgattatggtggatcagctttttgatgtgctgctggattcggtttgccagtactttattgaggatttgttcattgatgtacatcagggatattagtgtaaaattctctttttttgttgtgtctctgccaggctttggtatcaggatgatgctggcctcatcaaatgagttagggaggattccctctttttctattgattggaatagtttcagaaggaatggtaccagctcctccttgtacctgtggtagaatttggctgtgaatccgtctggtcctggacttttattggttggtaagctattaattattgcctcaatttcagagcctgttattggtctattcagagattcaacttcttcctggtttagttttgggagagtgtatgtatcgaggaatttatccatttcttccagattttctagttcattttcatagaggtgtttatagtattctctgatggtagtttgtatttctgtgggataggtggtgatatcccctttatcattttttattgcatctatttgattcttctctcttttcttctttattagtcttgctagcagtctatcaattttgttgatcttttcaagaaaccagctcctggattcattgattttttgaagggttttttgtgtctctatttccttcagttctgctctgatcttagttatttcttgccttctgttggcttttgaatgtgtttgctcttgcttctctagttcttttaattgtgatgttagggtgtcaattttagatctttcctgctttctcttgtggacattcagtgcaataaatttcccactacaaactactttgaatgtgtcccagagattctggtatgttttgtctttgttctcattggtttcaaagaatatctttatttctgccttcattttgttatgtacccagtagtcatttaggagcaggttgttcaatttccatgtagtcgagcggttttgagtgagtttcttaatcctgagttctagtttgattgcactgtggtctaagagacagtttgtcataatttctgttcttttacatttgctgaggagtgctttacttccaactatgtggtcagttttggaataggagtggtgtggtgctgagaagaatgtatattctgttgctttggggtggagagttctgtagatgtctattaggtccacttggtgcagagctgagttcagttcctggatatccttgttaactttctgtcatgtggatctgtctaatgttgacagtggggtgttgaagtctcccattattattgtgtgggagtctacgtctcttagtaggtctctaaggacttgctttatgaatctggctgctcctgtattgggtgcatatatatttaggatagttagctcttcttgttgaattgatccctttatcattatgtaatggccttctttgtctcttttgacctttgttggtttaaagtctgttttatcagagactaggattgcaacccctgccttattttgttttccatttgcttcgcagatcttcctccatccctttaatttgagcctatgtgtgtctctgcatgtgagatgggtttcctgaatacagcacactgatgagtcttgactctttatccaatttgccagtttgggtcttttaattggagcatttagcccatttacatttaaggttaatattgttacgtgtgaatttgatcctgtcattatgatgttagctggttaatttgcctgttagttgatgcagtttcttcctagcctcgatggtctttacaatttggcatgattttgcagtggctggtaccgtatgttcctttccatgtttagtgcttccttcaggagctcttttagggcaggcctggtggtgacaaaatctctcagcatttgcttgtctgtaaaggattttatttctccttcacttatgaagcttagtttggctggatatgaaattctgggttgaaaattctttccttcaggaatgttgaatattggtccccactctcttccggcttgtagggtttctgccgagagatcagctgttagtctaatgggcttccctttgtgggtaacctgacctttctctctggctgcccttaacattttttccttcatttcaactttggtgaatctgacaattatgtgtcttggagttgctcttcttgaggagtatctttgtggcgttctctgtatttcctgaatttgaatgttggcctgccttgctagattggagaagttctcctggataatatcctgaagagttttttccaacttggttccattctccccgtcactttcaggtacaccaatcagatatagatttggtcttttcacatagtcccatatttcttggaggctttgttcgtttctttttattcttttttctgtaaacttctcgcttcatttcattcatttgatcttccatcactgatacccttccttccatttgatcgaatcagcaactgaggcttgtgcattcatcatgtagttcttgtgctgtggttttcagcttcatctggtcctttaaggacttctctgcattggttattctagttagccgttcgtctgattttttttcaaggtttttaacttctttgccatgggttcgaacttcctcctttacctcagagtagtttgatcatctgaagccttctgctctcaactcgtcaaagtcattctccatccagctttgttctgttgctgctgaggagctgcgttcctttggaggaggagaggtgctctgatttttagagtttccagtttttctgctctgtttttcccccatctttgtggttttatttacctttggtctttgatgatggtgacgtacagatggggttttggtgtggatgtcctttctgtttgttagttttccttctaacagttaggaccctcagctgcaggtctgttggtgtttgctggaggtccactccagaccctgtttgcctgggtatcagcagcagaggctgcagaacagcagatattggtgaacagcaaatgttgctgcctgatcgttcctttggaagttttttctcagaggagtacccggccatgtgaggtgtcattcagcccctactgcggggtgcctcccagttaagctactcgggagtcagggacccacttgaggaggcagtctgtccattctcagatctcaagctgcatgctgggagaaccactactctcttcaaggctgtcagacagtgacatttaagtctgcagaggttattgctcccttttgtttggctatgccctgcccccagaggtggagtctacagaggcaggcaggcctccttgagctgcagtgggctccacccagttcaagcttcccggctgctttacctactcaagcctgggcaatggcgggcgcccctcccccagcctggctgccaccttgcagtttgatctcagactgctgtgctagcaatgagcaaggctccgtgggcataggaccctccgagccaggcacgggatataatctcctggtgtgccatttgctaagactgttggaaaagtgcagtattagggtgagagtgacccgattttccaggtgccgtctgtcacccctttctttgactaggaaagggaattccctgaccccttgtgcttcccaggtgaggcgatgcgtcaccattctttggctcacgcttggtgtgctgcacccactgtcctgcacccactgtccgacactccccagtgagatgaacccgttatgtcagttggaaatgcagaaatcacccgtcttctgcgttgctcacgctgggcactgtagactggagctgttcctatttggccatcttggttccatcccccctacttttgagattttaaacttgggatgcctttgattcattttattcaagtattaatttgagtaaaaagtcatgtatgtgcatgaagtattagctgcagtggtggttttgttcttcataactttgctcataatagctttgtttatttatttattcatttatttatttttgagacagggtcttgctctgtcacccaggctgtagtgcagtgacatgatcttggctgacagcaacctctgcttcccaggttcaagtgattctcctgtctctgcctcctgagtagctggaattacaggcatgtgccaccatgcctggctatgttttgtatttttagtagagacagggttttgccatgttggccaggctggtctcgaactcctgacctcaggtgatccacccgccttggctgcccaaagtgctgggattacaggcatcagccaccatgcctggcctgctaataataactttaaaaaacctaacatttcatattttgataaataaatgcagtactcatatccagttgaaagggaaatacaacattatttaataaacatattacatctaaatattaaaaaattcctatcatatgataaattaaaaaaaagagaagagattaagcaggggcttagaaacataaacaaatataaacaaactttacaaaactgaatggattagcagggtgttggggcacatgcttgtagttccatctccttggaaggctgaagcagaaggatcccttgaacctagcccaggcaataaagcaagaccctgtctcttaaacaaaacaaaacacaaaacaaaacagagacaattggaggaagacagaaactagaaagaaagtgtaaaaaaataaaaacaccccaaaactcacagaaattaaagtgatttttaaaagttgggttgtttatttgttaactatgagcatgaccgctctacagtcagaaaagataaaatcaaggctcagatggggaaacgcatggtgctgcttttagaaccatgctcagaaagatttggtggagtttaaacaaacaagttcagacttctgttgccctcttttataggagtgaaagagaaaggaaggaaagatttacaaaggtgtaaatccctttcatcccctggaccacagaggtgtagcagagaatggttcctgtaagacttgaaaactgaaagtacaacataggtgcaatttgtgactaagtatcactggtacaaagaacttaactgattgaaatatatcaataagtaatctcttgggtggtcatacaggaatgcttaaaacctcagacccaattaatggcaaaacaatgaccctacatctgttttttatgtatacacacacacacacacacacacacacacacacacacacacacacaaatacatatgtaacaaccttttttcatggactgtcttagttcatctcattttgaggaaatagttgttgaatgacttctgtgtgtttctgtgacattgtattaagtattcaaatacagacttaaaaaagtaacttcctcttatggctattatattttaatattcctgaggcagatcattatcgattacctgtcagtctccttggggtttccatgatatccccttgacacatctctattgttgtcttccacattgctttgtgatggcttctgttcgttcatcttcttctccagactgtgagcttcttgataacaagatctttgtctcactgttttgggattctcagatcttagcacagtcctagaacattttatgctcttttcaaaccttcgttgaatgaatacattaatgattctcaagtatatatttcaagtgttgacctgtcccctaaattccagagctgctatcatcatcttcctgttgaatatttccatgagtctactatctttcacaaacccaaactgcttctcttccgtgacaaatcagcagccccttctggctccactgtttttgaagtaggcccccttaaagctgaagattcacagtttatttgtccatagttgccctatcttagcaccctattttaaaatgtgtttttgttatgcagactttgtaagggtcaaatcatggccttcaaatcgatttagagaaattgaaatctcgcaatgaatatctcatgagaagagaagcataatgaagactacaaaaaagcaatgcatttaaaaagtagcatgttgctcctgtgtgtgtatagcacaagagaagcttagaagagtgacgatatctcccagctgtcacacttttattttatatccttcagttatttgtggcaatgatggaaaccagaacaatatgattgacatccttagagtattcataacactattcttagctcgcatgtgaccttgcattccctcagacctttcaccatttctcttttaaacaaatttttaaattttctaacaatctccagtttacaagaacggctatagcacagtccaaagacctttttttttttttttttctgaaccatttgaaagtaaattgctaatcaaatgttctatcacctataaatacttctgtgtgtttttcctacaaactaggtcacttccctgcaggaccctcagacaagcataaaaatcaggaaagtaacactgattacttactattacttactattcttttttttttttttttttttgagcagatctcaacagtgggcttaaaatcttcactaaaccatgtgttgtcatttctggaacacaggtagaatagatgtagcataattctatttttttttttttttttaggtggagtcttgtgctgttgcccaggctggagtgcagcggcacaatcttggctcattgcaacctccacttcctgggctcaagcaattctcctgcctcagcctcccaaatagctgggacgacaggcacatgccaccatgcctggctaatttttgtatttttagtagagataaggtttcaccatgttggccaggctggacttgagctccagacctcaggtgatccactcacctcagcctcccaaagtgctaggattacaggcataagccactgcacccagccagatgtagcataattcttaagggccctaggatttttggaatggtaaaggagcactggtttcaacttcaagtcaccagctgtattagcccctaacaagagagccaggctgtcctttcaagctttgaagccaaatatcgacttctcccttctagttacaaatgtcctagatggcatcttctcccattaaaggctgtttttgtctacattggaaatctgttgtttaatgtagccactttcattatgatcttagctagattttctagataacttgctgcagcttctacattaacccttgctgcttcaccttgcacttttatgttatgaagacagcctctttcctcaaacctcataaaccagcctctgctagattccaggttttcttctgtagtttccccacctccctcagcctttatagaattgaagagttaggacttttctctaggttagggtggggcttaaagaaatgttgtgattggttggatcttctatctaggccactcaaactttctccctatcagcaacacagctgtttcactgctttatcatttgtgtgctcactggagtggcactttagtctctttcaagaacttttctttgcattcataacttggctgtttggcaccagaggcctagcttgtgacttctctcagcttttgacctgccacccttactaaggtcaatagtttcttttgatttaaggtgacagatgtgtgactcttctttcacttgaacacttagaggccattgtagggttattaattggcccaatttcaatattgttgtgtctgagggaatagagaggcccaaagggagggagagagacaggggaaccacctgttggtggagcagtcagaacacacacattggttgattaagttcacagtcttatgggcatattgtgtggttcccccaaacacttacagtagtaacagcaaagattacttattgatcataggtcataataatagataaaataataattaaaaaattgaaatattctgaattaccaaaatgtgatacagagacatggtgtgagcccatgttgttggaaaaatggtggtgatagccttgattaacacagggttgccacaaaacttcaatttgtaaaaaacataatacctgcaaagcaactaaagtgaagtgcagtaaaacgaggttatacctgtatattaataggtgactccaataaagacttcggtaatctataacaaggagccaactatcaaatggcaactgcaaagatagttctctcactgaagctaacaaaaacatctacaaactttcagctgaaaaatcaaaaaagtttgagttgtataggacattctaacaccagggaatgagacatatctttttgtatgtaataataatgcaagcctgaaagtcttccagtgactcacagagtaataactgtgacagaggctttctgaattacacatggtgaattttacaaaaacataatatgtggatgatgtttacataagtttatatcttcttccatactatgtaatgtggttctacaaatgtttaggtaattagggtttaggagggtataattaaatgatttattattcaataatatgcttgtgttgggacattgtggaattttacctgctattgttgtgaggcccggagccaaatttaatcttatctattagtgcacaatatatttcttaaccagattttaaagaaaatctagccaaagttgtatgtgattcatgttgtatcttcctcctgatgttagttttaatgctttaagatagtagtagctatgattgatgccactgaaacttttagttcacttgactcctctatatagcccatggatacccagtgtagtacattgatttggttttatgactattgacaccattttctgatttatgaaggttgacttgtccacaatcggtgagagctgggatttaatccagatattctggctacaatcccaataagagatgggtcattcttatccttcattcatgtattcattcattcatatcattcattcattcattctttacacagaaatgtgttggtacctatgatgtaccaggtatttttctagccatgggaggcatatcaacaaatgaaaatgataagaacccctaccctgtggagcttacattccagtagggcagaggggaaacaatggcagataacataataagtaaattctgtagtatattaagtggtagtaatgtatacttggaaaaaagtaagcaggtaaatggaattgggcataccaattttatacctctttggagggagatatgaattaatttttcaattttatctcataaattatgtcaaaataataggttttgtcccaagcctttccaagcaggtagcctggaacaagtgttctgctcttctcctctctccccactactcagaacattgctataaaagatagctaaattacaagatcaacttacagagtcctacttaattcattatgtagctcaactgtggttcaaatctagtagtgttatagacctaaccagtccttacagtgggttttctccccagtctggtaaactgtattccatgctccagctgcaggtgacaggaacctcatcctttcatgctgctcttttagctttgggagtaagcaactccctctccttccacattatccaatattgtgcggcagagacttgcttccattaaagatactgatagtggctcctccactgctagaagcaggaggatgatcttggggaatgattatggatttaaaggaggaagagatagtagcataggcttctgttttcacaggaaataggaaggttgacagttggaagaaatcgtagaggagtcccagctgggatcagtgacaggagggaggaaaagggaggccctggtctcacaggaaggttgagttattgggatgtttatgagtcaaggatggtcgcttatcacccagtatgtaggtttctgtagataaattcctgagatgaatttacctatgccttcttgcttgatttcttttttgctttttctttctttctccctttccctttccttttcctttcccagggtattgctcttttgcccaggctggagtgcagtgtgcaattatagctcactgcagactcaaactcataggctcaagtgatcctcttgcctcagtcttctgagtagctaggaccacaagcatgcaccactatgcctatctaattttttaatgtttttgtagggatgggattttgctatgttgtccaggctggtcttaagctcctggcctcaggtgatccttccatcttggcctcccaaaatgctgagattataggtgtaagccaccatgcctagcctcatttaattttcataaagtctgaaattattatctactctaagtttggcaagcaactggttgtttagagtttagtaataattttttgaaaagatataatggatataatttttacatatttgtttaatagcatcctcacaaagaaatttttaaatttcttttatagaattctgattattttacagccctgaggtactcttaattttaaaatatatttcttttttaatacattatttttcataaaggctttataatcagcatgcttttattttttaaaaatattgtactactaatattgttgcataacttcaaaaattatcatttagtagccatataatactggctaataattaacataatataatataataaatataatataatataatatatagtctattgataaataggtatttgagtgtttatctgtttgccttgtattatactaggaaatgtggcttgccaaaataaatgcattatgctttcggttagcttgtagtctcattcataaagcaatgtagatacaatgcagtaaggataaggtgaaatctgcctttgcaaagggatttttaatttggaaaaagaagggatttgtgggacaatgagatagaaggctttacagaaaaactagatggctttgtggagaaagagaatttaactagttattaccagttcaaccgctacatccccattcagaccatcagcatactgtgtgtcttcctttttccctgctttccccttgcaatctatttgctatacaggtgccacagtaaaaagcaattcagatcaagtgactcctctgttcagaacccaccagtggtttctcaggtcatttataatgaacccctcagtctttaatgatatagcctacaaagttctgcatgatctgcccccttggctgcctctctaacctgatttctgacttgtgttttccttacacacactgtctcttgatgctggacgcattcctgtacgtcacacactcccagcatgctctcacattacaatgtttgtaattgccattccctccaccttgaaagtttgtctctgcagtatttccctggcttgctctcatttcctttggatctctgctcacatgttacctccttagagagggccttcctgaaaatgatagaagtgttttttttggagcacatcccctcactccccagctcctctccagtgtatttttctccatagcatctttctgcctgaccttgtatttctatatctttttgctttttatcttctggaaaacaagctccatgagatcacacagggattttgctttattcctcactgcatgtcccctcctaatacagttcctggaatacaggtgggggttcataaatatttgttgggtaaatgaaagaatatattaaaatattatcataaaccttttttctttccatgatttgatgatgtggaattgaaaacaggtctacatagatgatagtgatataatcaacagcattcctgagtacgtctaggatcagcacttggtctagaaaagatctgtcttctgccctcctttcccgtccatgcacatccactgcctttgggatcaaacccaatctccttcctctggcagtcagggccttctgagacctcatctctgttgatctttctagctttacttctaccaagtcattcccctcataactgcatgtcatactgagtggcttatagttcccctcctgtggcccttgcagatatttcttgcattgcttttcatttgtcacttatttgtttatgggtttctcctcacagtgcataagctcttcaaaggaagaggcctggtatatctttgtatttctgggatctagcgcagttcttgtatattgtagatggtcagtaaatacttattcaatgtaaaagatgttttttgccttccaaagactagtggtaacttgaaatggttggatataggacagataaactgatagaagcagttttacctcattagagggcttggatataagtatgtccagggacaaatatagtaaaaaagagagcaatattataatatcctttaaaaaaaaaaaaagagacaggtcttgctgtgttgcccaggctggtgccattatggctcactgtaacctcaaactcctgggctcaaacagttctcctccttcagcttcctgaatagctaggactactggtgtgtgccaccatggcggctaattaaattttttttttttttttttttttttttttttgtagaaatgggttctcactatgttgcccaggctggtctcaaattcctggcctcaagtgatcctcccatctcagcatctcaaagtgctgagattataggcgtgagccactgtgcctggctagaatatcctaacttttagcaaaatcatacctgagatgaggaaggatggcatataacatgattgaatcagcacacttaactaagaaagatagcctaagtggaaagaagggttatttgaaaggcattatttagaaagaaggggagccatttggcagtggactgactatgtgggcatcagtcctttatttagtcactgagagtcatgcaaggtggtgagcctgctgataatgaggaaataatacagaggggagaattcaggggagtgatgacacgttcacgttcttgctattttggacttattaacaacgtgagtgttgagggttatgatagtgttagcctggctgctcctggttcgggaaagagtgctatgaaaattgagatatatctgtctagtgtatgggaggagaaaatggctgtatttggttctatatatttgtcatgcctggttgatggtttgtattttctatagtgatttgtgagtgacaatggatctatattcaattgacccagtatagttgaatatgtgaaaatattttatgtaattttactaatatatattttgttaaaatacaaccatatagaatctactaggctataggtgttgaaagataacatttttttttttctaaatcaggtttgttacagaaggagaaagtggcagttgaagcatttcagatttgctgccttctcctacctcctgaaaataggagaaagttacagctattgatgaggatgatggcaaggatttgcttaaacaaagagatgccacccctgtgtgatggctttggtacccgaacactggtaggttgatttttaacatcaggtatgactttttggaatgaaagtcgactgagtaaggtgtattagtttgggtgatcagagggaagtacaaagcagacttgcttaaaagagccacagtcagtgtccacccagacttgtgtcgtgcttttgttctaagtgtcttaaagaacataatgagaaatggagacttgagtaggggcagactctgtagagagatctgctacatcctgttctcccacttaaaattattttaaatttattcttaattgacaactaataattgcatatgtgatgttttaattcatgtatacattatagagtcaatcaagctaattaacagattcattaccataccaacttatcatttttttgtaatgagatcattaaaaatctattcttttctcaattttgaaatatacaatatattattataattgtcgtcaccgtgctgtgcactagagcattaagacttgatcctcctgtctcactggatctttgtaccctttgaccaacatctatttccatgtccctgtatcccccagcctgtggtacctaccatctaatctctgcttctattggcatatgtttttaaagagagtttattttagaatttacttactagcaaaatctcttgattttcctcaaaaaatgtctttgagcaaaactggtgcttcagtggaatgtatgtgctttccatatcctgttaaaacaccgtgtactccctggggattcactggcccagttttagaagtaatagagtgagatcagaggagcacttagtgcccagtaggattcttgatctctatatttttttggagtgagtggatggttagagaggctaatagacctttttgaaaagctgaagaaaactttatatctattctgcatataaaatacacatgcaaaactttgcatgcagtttcaaggcgatcacagagtccctggggtccatggtctccaggcaaaaaattctctgcctgtgtgtctctctgtacatgtaaatgtaagtgaagatcatttgcagtgtgttaatgaagtgttactaagcagaattacatgattttttgcttaaagattttgaaggaagattgtcagcaataaaagtagtaggaaaaaacaaaacaaaacaaaagccagtccaaagaacagtattaagaatggagtagttaggctgggcgtggtggctcactcctgtaatcccagcactttgggaggccgaggcaggtggatcacctgaggtcaggagttctagaccagcctgaccaacatggtgaaaccccgtctctattaaaattacaaaaattagctgggcatggtggcaggcgcctgtaatcccagctactcgggaggctggggcaggagaattgcttgaacctgggaggtggaggttacagtgagccaagatcacaccattgcactccagcataggttacagagcgagactccgtaaaaaaaaaaaaaaaaaaaaagaatagttaatttcaattctatggaaattattacattgatgctataatatattttgcatttctgcttgcctcaaagagagtctcatcacttaatgtacttcttgaaaagtcccatggctttgttcaaagatgattgtcaaatatacatcgaaaatcctagagaaaataagctaactaggaaaagatgtaatggttgaggcatgtggactgtgttagcggtttaaaacaaatcaataatgaaattaggataaataataattgactaaatggctataaagtgctttgaacttagtagtgctacatgattcaagtcatggtgataatgattttcaaaatttgttttcatatatttatatgtgtgtatgtgtgtgtatatatatatatatatatatatatatatatatgtatatttaaaatcgtgtaaaaggaggtttaaaaattgctcagataagcatctctctgcagtctcttaacaggaagatgcacattttgtttgttctggttgttgagaccgtcaacccatctgagatggctgggtactcttggtagaatatgcaccctgtgccttagaccatttctcatatttgccttttgcaaattagattgcactcagttcagaaaaatactcatctgcgtttaccccccaccccgctctttttttagatggttcagacattttcccgttgcatcttgtgttccaaggatgaagtggacttggatgagttattagctgctagattggtaacgtttctgatggacaattaccaggaaattctgaaagtccctttggccttgcagacctctatagaggagcgtgtggctcatctacgaagagtccaggtaaaggagaggatattatcagttctatgaaattggcaatataaagtcacgtaagcttgctaggcttcttggggcattttattatgaggattaagtgaattaatgtttataaagtacttacaacaggtcttggcacatagtaatcccctgcatgtgtttgtattatcattgaaaagtttacagaatgcacatttggttttgtgtatcaatccatgtggcatattttttattgctaattccttgaatgagtttgtttagaatctacatacacctactgatggaaatgattttatgtgcagtaagtgtcttgattcataattgccctgtgacctagtttaatattcccactttttgcatgaaaaagctaaggcacaaagaacttaaataacttcgcttaaggccacagagccagaattctgactgttgcagtcagcctctgtaatcagtgctctaaactatcattccatattgcctgtctaaaaatcatagtacagtagaagaacactggcatgagagccatgaatccctggccaaattcctagctgtatcctttctgtcgtgtgactctgggcaagtcccttaaccgctttggattttactttctttcctcaggcgttaaaatgggctattctttctttataaagttgtgaagattagaacactgtactttacaattcctaggatgaatttctgacatatgtcaggtattctttgaaaggtagctgctgctgttgtcatggtggttatataaaaacaatgcaaaagaaatataatatattattatcgtgtggaccccaaagtggggtttgtatgtcagcctgtgggagcagaaacctggtaaaggcaggcagaaggtccacttgactccttctgactgattggacctcttctcatttgagatctttttgaggcaccacaatcaaggaccagtgaactgcctccttctgaggtattacaaaaataattaattgtccagctgtttctagaaggcaattttaaaattaaaattttttctatttttttgcaattatcaacctaacacattgaagaaacttgggaaatatagaaaaaacacaccaaaaagtatcagagttacactaaaatgttcatagtcagtaatatagtctttcagatttttttttctgtgtctgtctgctgtctatgtccatgcctaccttactttcttccctctctcttccctccccaccctcccttccttccttccctccttcccgccttccctgcttccttcttgcctgcctcccttcctgcctgcctcccttcctgccacttacattctgttaacaatgagaaaaaaattcccccatcattaaatattgttgattggcatgagaatggccaagagcacagactcaggagcctttgaattcatgacatgccttttgttagctgtgtcaccttaggcaaattatataacatgtctgtgcttcaacatctgtcccaacatttctttttctcatctgtaaaatgggaataatagtagttaatatttacctcatagagtttttctggggaattaaaacatgtgattaaaatacatgtgggcttaatacatgtgaaatgctcacaataatgtttatcacattgtaaacctacaattagtagctgcctttgttgttggtatcatcattattgttatattattccataataatattattggcaacatagtattccataatatggatataccataatttatttaaatgatactttttggttggtatttagattgttttcatgctttcccccattttggaagcaatatagcagtaaatatttttaaaggtagattttttttggctaatctgtgattattttttaagaataaactcctaggggcagcattgcttggccaaaggccatgaacatattttaagtatctatagcatattgccaaatttagaatgatcatttcaatttacatttctgtcagtggtataagagagtgttcatttctttgcccctttgcctactttggatattatcattaacacttgtatatatctttgccacttgcatgggtgaaaagtgtaattttaactgctgttttagtttaattttttcctctgatatttttatgagccaaccctaaagaaaataaaaatgaacagaaatacttcaccaagtttctgcaaggaaatgttatagcagtgtattagtctgctctcatgctgctaataaagacatacccaagactgggtaatttgtaaaggaaagaggtttcattgactcagagttcagcatggctggggaggccccaggaaacttacaatcatggcagaaggggaagcaaacacatccttcatgaggcagcaggagagagaagcaccgagcaaaagggagaaaagcccctcataaaaccatcagatctcatgagaactcactcactatcataagaacagcatggggggaaccaccctgtgattcagttacctcccatctcccacagcaaggggattatgggaactacatttcaagatgagatttgggtgaggacacagccaaacaatatcaagcaataactgtgttgccctgtatacttgctaggtttgtgtattcacatgcatagcacaggcatatattgtagtaacttagccttgtgagccctttgctattacttgaagttcagaaggctgagctatggtgattaatttaactgcaggtaaacatgatcttgttaagagacactgcagtgtgctctgaataaaatcagtagtgattcatttgtccagttaccttttctctcttgcaagtacatattagaattgccaagcacctgttccattcagccctcagaacctatagatctttgttcttttgattaggctcctaagcctctacactgtatcacatttaggggagtgcttctctgaaaatgcagtgttgcttggattattccagtgattgttttaggacagtttcagggctgaccctgggatacattattaggtaggcaatgtttttgacacaagccttctatgatcctcatctgcaaccttctatttcaaaggactccaggctctgaaattaaatatttttaatgtatgttcatttattcacaggccttggtttcctttttcctcttatttctctcttctcccttatcccttctgcaatgtctgcacctttgttgttttacttgattctcatgggtaagatgttaggaaatgattgtagtacccctctcttcctaaaagcttagctaaatgcntgccactaccatccccaaggcattgagaatcacactcttcagatgtgggaatgcgcctggatagttccagtggatatccaacattatcaatgttttgaatcantttagtcaatgtgtttaatttatgcttgaatttcagatcttgttaaaagagggaatgccgagaccagctcggtcgtggagaccctaacccagtggccctagaggaattaaagacacacacacacacacacacaaatatagaatgtggagtgggaaatcaggggtcttacagccttcagagctgagagctttgaacagagatttacccacatatttattgacagcaagccagtcataagatttactaaaagtattccttatgggaaataaaggggtgggtgaaataaagggaagagctctggctagttatctgcagcatgaacatgtctttaaggcacagatcgctcatgctatngtttgtggtttaagaatgccttaagcggttttccgccctgggtgggccaggtgttccttgccctcattcctgtaaacggacaaccttccagcatgggcatcaaggccatcacgagcatgtcacagtgctgcagagatttngtttatggccagttttggggcctgttcccaacgagggcacaagctttttttgttattgaaatggctcttgggtttacaaaggtaaaaatccaatttaaaaccgtggctttaaataataatattttgaagttatggaaatacttttacttttcaatatagagtttcccccaatcaaattttgaggactaacatggcattgctacggtacaaggagatatcctgtatttgatctaaactaattcttataatttatttgaaaatatgctatattctttcactactaatccttttgcctcagataaaatacccaggagctgatatggatatcactttatctgctccatcattttgccgtcaaattagtccagaggaatttgaatatcaaagatcatatggctctcaggaacctctggcagccttgttggaggaagtcataacagatgccaaactctccaacaaagagaaaaagaagaaactgaagcaggtaaaaggatattctttataagccattttttctcctccctactgtttttatgtttttttttttattttaataggcttcatgtaaatctcatcttctgagccatagcagttttctaagtatattagttcatacattctagaagtctcactgatttacacacttgtggtcagtatcctagatctttattcttcagtgtaaatctgttaccattgccaaactcttcatttttggagctattctctaatatttgtcctttgttttggtatgtggcatgatgtgaattagcagagcatctgctttaatctcagagaagctatcagtgagggtggatttcttttcatgttttcaaaaggcaaatcagatggaattcacaggtgtaaaatgtttagagtttaaaagccgttggttttagatagccactatcaaattagtttcttgcctcaggtatcagtacaagtttttagttcctcttatgttaggggaacacagcttagggttccagcgaatcgtttttaactcacaatatgttacttttgactattcataaaggttgatccatgatcaggtgagtggtttttgtttttaaagactgaactctacatagttggattcagggaacaccgtacatgtgggattacacacagagcaccagagttctgggcttctgatcatattattctcagagtaattttggaggagagtttagtggtaaagatcaacagaaagtatactgcctctcttttaagcttttcacaaagtaatatacaccagaatattccctcttccatttgagcagaagctggtggggctgagttggagaaacagagaaatgatgaaatgtaattgggccaaaattttatttaactgtgtagaacagaagttattttgaagtcagagttacttgtgaatatataaaaagtgaggtctatttatagttggcagtggggggaattttcagaaacatgattaaaaggggaacttatttgaagcttagatcaaaggaaagatggattagctctatagaaattggaatgaaatgttttaacaaaaataaacaaaaacaggaaaatacaggctcagaaactcttaaaatttggctgccaaattttattggcttttatgtgtctttttttactcttcttggaccattcatttttttagtttcagaaatcctatcctgaagtctatcaagaacgatttcctacaccagaaagtgcagcacttctgtttcctgaaaaacccaaaccgaaaccacagctgctaatgtgggcactaaagaagcctttccaaccatttcaaagaactagaagttttcgaatgtaataatacttccacagcaacaggtgctagagaccactgttgttgttttgagtgaatggtggttaggagaaagactttggtggtggaagaaagaaaagcataaaacaaagactactgaaatatagataaagattgccttagtttttaaaaatgtttggccattagtatttttataaaactcaatgctagttttaaagtgtataaattggttaaaatttatgagtcaaatatatagtgataatgttaacatgtttgtaattgctacagaatttaagggtatttttatctctgtgctttctttttcatggtgtttattaaataattgtgtatatacatcctagctactgatatctttattatagccttaagacttaattttaagtcttaaaaatagcgtgtatacttgaataagaaagacactgggtactgttactgtgatgctattgacttagtagccaattatcatttctcctgtataaattccagtttttattgctgcacataaattttttaatgtcttatattgtgatagctatgtcttttattgcagatttattggatgttatgacagattttactaaagctagtgtttttataacatatatattagttgatgtttacctataagtggagtagattttcatctgcctgcaatggtataatttcagtcttagctaaaaatggaaagttgaactggataaattctttgggtacccttagacctctgattctaagtcaaatgcaaatgggttaaataaaatgagactacttcctttataaatatattttcatccttttgaaagtaagtgaaatgtaaataaacttattttttttaaaaatgccatacctcgtgtttcttttttggcatttatttagatcagttagagagcatcctcaaatgcctttgccaatggtcttcatcagtcatttatttctatgagaaaatgaaaagtaagatttgggcttttgtactgactggtctttaggtgagcactttgccaattttttagcattgctttgtccttttgtaaaattgtggtgcacttggattatggagcatctgaaagtcttcctctgagcgcaattacccagaaagctgagagcaacacccactaattggcttacagtactccttggactgatttttccttgcacttaagatttgctcctgttctcttgtagcaaaatacctcctacatctgatgcagattttgcttttaaaaatggaccaaagtattcctattggtttgggtaccaccttacattccaaatacataatgtaatgggagatttttagtgtttcaggattcattctcagactttggcattctgtttagagccaagaataattcttctttctgctctattttcactccgaggtagagtttatttttcagaatctcttttcctgttgcttgtctttggaagtatatgtggttgttttctttccttttttttttaagattacttttttaaaaaaatataacatatttatggagagatcataaaacataagcaccaattaagtgtgaaattgatgaatagataatagcagttatccaaagtggttgtcccaattaacgctcccattaacagtgtatgagaactccttttgtttaatatcctcaccgaaacttgctatcgtcagagtttgaaatgttgtcaatgtggtggttattaatagtgtctgattatggttttattttgcatttccatgattattaatatggctgaacatttttttccatttttttgactttttcgtctttgtacaaattttggtatcagattgtcaagcctncatacacacacacacacatgcagagacacacactcaccctgttgagtttttttttttaattttgattgtattatatgtataaatcaatttgcagagaattgctgtctacaatattaggtcttctagtccatgaccatggtttacctttccattttatttgaaataaatgagaaaaaaagttgcttttttctgtgaagatttacaaatctttngttagatttgttcccaagtatttgatactttaaaaaaagtatcaaaattttcaaagactgtagtacccatttcctgtttcaacagttactcagctgatcaatgttgacgtttaattcttttgtaaatgctggtgttgtaaatttccttatagtgtttgttgcttctgtatggtataaaactgatttttcctgagttttgtttacagtgaaccttgctagacttgttaattctaaacatttagtatgattctttggcattgtctacntattaggaaaaaaacagcttttgcttttccgttccatggtagacagcatctatattgtcctcagtgatccttgcctcctggtatttaatgccttgtgtaatttcctgtccttgagtgtgggtggagctaaaatgacacatttctaaataatagaatatatcatcagtgatggggtatcacttctcagattagattccaaaactctggcttccatcttgcttgtcttccttcttattctctccctggcttgctctgaggaaagccagctgtcatgttgtgagctgccctttcagaggcccaccaggcaaggaactgatgtctctggccaacagccagcgtggacatgaagcctgccaacagctttacgagtgatcttggaagtggatcttcccttggtcaaaccttgaggtgactctaccctagctgacaccttgattggagacttttgagaaactctaagccagaggacttagcaaagctgtgcctggattccttattcacagaaactgtgatataataaatgtttattgttttaacccacttagttgaagaataacttgttataaagtgacctagatacaatatactttccaatctccatacccttccctcccttcccttccgtcccttccctcccttctctcccttcccttcccttcctttcctcccttccctcccttccctcccttcactttccttcttttctttcctttccttcctttccttccttcctttccctggctccctccatcctttccttcttttttgtctcaggacactggagatcttcagtacagcagttccctggttcccatttatctgctgtttcactttgtacagtttcagtaagccacgctcaaccacagtcagaaaatattaaatggaaatattccagaaataaacaagttttaaatngtgtgctgttcttatagcatgatgaaatcttggactgtcctgctttgtccactctgaaaatgacttatccctttgtttcatggatccatgcctggtagaccaggtacattgtnaatgagcagtaatattttgaaaggaatctttttttttttttttttttttttgagcagcagatctcaatagtgggcttaaaatattgagtaaactatgctgtaaacagatgtactgttatccaggctttgcagagcacaggcagagtagatatagtgtattttttaagggcccaaggattttttgaatgatagatgagcattagcttcagcttcaggtcaccagctgctaacaggagagtcagcttgtcctttgaagttttgaagccaggcattggcttctttatagctatgaaagtcctagatgacatcttctgccaatagaacgctgttttatctacagtgaaaagctattgtttagtgcaaccaccttcatcattgatcttagctagattttctggataacttgctgcagcttctccagcctttgttgcttcaccttgcacttttcagttaatggagatggcttctttccttaaacctcatgaaccaggctttgcttgctttcaacttttcttctgcagtttcctcacctctctcagtctttatagaattgaggagttagggccttgctctatagtaggctttggcttaagggaatattgtcgctggttttatcttctgtcctgaccactcaaatgttctccatttcagcaataaggctgcttagcttttgtatcgtgtgtgtttactggagtggtgcttttaatttccttcaagaactattcctttccactcacaacttgactaactgtttggcacaagagacctaaactttccttctatcttggctttcaacatacctttctcattaagctcaatcatttatagctttcgatttaaagtgagaggcgtgcaactctgtttcacctgaacagaggccattgtagggttattaattggcctgacttcaatattgttgtgtctctgggaatagtgaagcccaaggagagggagagtgatgggggaatggctggtgggtagagcagtcagaacacacaacatttatngattaagttctcagccttatatgggcatggattgtgacaccaacaaacaattacaatagtaacatcaagttcactgatcacagatcaccgtaacagatgtaataataatgaaaaacctttgagtattgtgagaattaccaaaatgtgactcaaagacatgaagtgagcacattactgttggaaaaatggcaccaagagactttctcaatgcagggttgccacaaaccttcaatttgtaaaatatgcagtgatctggatacaatatacaatataatctgtgaagtgcaatgaaaccagatatgcctgtgtatatagtgttcaatactatatggtttcagggccaggcatggtggctcatgcctgtaatcctaacactttgggaggccaaggcaggcagactgcttgaagccaggagtttgagaccagcctggccaacctggtgaaattctgtcactactaaaaatttaaaaattagccaggtgtggtggcgggcgcttctagtcccagctactctggaggctgaggcacgagaatcacttgaacctgggaggcagaggttgcagtgagcccagatcacaccactgcactccagcctgggtgacagagtgagaccctgtatcaacaaaacaaaacaaaactatatggtttcaggcacctatggaggtctgacatatccctagcagataagggggagttactgtttaatgtggaatagagtggggatcgcagcagcatcatcttgctcctaatttcaaagaggaggtttttagcattagagtatttgtagatacccttttataattttaaaagaagttattttctatttctattctattgtcaaaaaatttttattgctcgttttaaccataagttgatgttgaatcttaatcaactacctttcctacatttgaggattttataagttctatcttttagtctatcattggggttatattacattaattgattactaatattaagccactttgcattctaggagtggcataaatctaattatgatgtattatcatttgaatatatatatctagattctgttgctaatatttagtttatagttcttgtatctatgttcatgagtaaaattggcctgaaaatttccttctcttactatctttgttgactttctgatcaaggttataaattaagctgaaaattactctctttttctatatatggttggaattatttctttcttgaatcttgggtgaaacttagttaacttttaaaaaataaataatgtaattacaccgaagtcagaaaaatggtttgtataatttcaagtctttgaaatttgttgagacttgttgcatagcctagtatatggtcaatttttgttaatattctgtacacatgaaaagaatatgaattttgcattgattacagtttttttctctctctataaaatcttgtttaaatttcctacaattttactgatttattttgcctgcatatatatgtgtgtgtgtgtgtgtgtgtgtgtgtgtgtgtgtgtgtgtgtgtgtatgtttttttcccccttttctttttagagacagggtttcactctgttgcctaagctggagtgcagtggtgcagtcatagctcacagcagccttggcctcctgggctcaagtgatgctcctgtctcagcctcccaagtagctaggactaattatgctcagctaattttattcaaattttttagagattttgtcttgctgtgcttgttacccagactggtcccaaactcctagtcctaagtgatcttcccaccttggctgcatttatatttattattgagagaattattatagatttctgattaaattcattttgaattttcatatttatctggtggactgacctttttatttatcattataaaatgtcattctttatcattagtaatgtgtttgtctgtagtctttctgtattatattttaggtgtatctcttataaacagcatgtagtttatgttttaagaagccagcttcacagtctttatttttaattgtagcatttagacagtttatatttaatacgattactctaattttgggtataaatctactctaattttgggtaaaagcacctttactgatgctttctaacattatcttcactttcttgcctttgtttggattttggaaataatttcatggtttctcctgctaattttgaaacttatgcactgtttccagtcttcttgttggattccctaggaattatgtcttttatactaacatatcaaagtttaaagttagtcagtatcttttccctcatcccagactatttagggaccttaatgcagtaagaacacccttccaattagatattattataatgtattatgctttattgctttttaaacttcataatatattgttgttattttatatagtctttgtttactagacttacccatgcattttaccactttttttcttcttaaagtaaattctttagaatttatctgcagtaagggattgctttgtttttgtctgaaaactttttaaattttgcccttattctttttaacagctttattgagatataagtcacataaccatacaattcacccacttacaatgtataattcagtgatttggggtatgttactttttttttaagttgtggtaaaatatatatggcagaaaatttgtgttttagccattcagtgtacaatttagtgtaaagaatgccatcattgtttaaagatagtttaactgtaagttatggactaaatatttgtctccccagaaaactcatgtgttgaaatcctaacccccaaagtgatggtattaggagatgaggcctttgggaggtgattaggccaagagagtagaccatgaatagaatgagtgcccttataaaagagaacccacagagctctcttgccctctttctatcgtgtggggatacaataagaagtcagtagtctacaacatggaagagagccctcaccagaaatggaccatgctcacaccttgatcttggacttccagcctccaggattatgagaaataaatttctatttataagccacccagtgtatggtacttgttatagcagcctgaactgactaatacactgtgtatagaattctaggttgatagctattttatttccatatactgcagttatgcctttgttagctggcttccattactgctgtttaaaagtcagctgccactctagatatcacttctttatcaataatgtgcccctttcttggcaggctgcttttctctctgtctttcgtggtctttcattgatgttgctatatcttggtgtgtactttttaaataattatcctgcttgggatttcttgagcttcttgaatcagaagtttgaggtcttttgtcagtttaaatattgcctttgtcacaatctctcctctgcttttgaatctttaattaaatatatgttagctctcactctgtctcttaatctcaatgtatgtctgtattttngtgtttctatgctgctttctggataatttcttcagaatgttcttatatttcagcacttctagtctcctgttcaattcatatatccactattatggattttacattcattttactgtccattttacagctcaggaaactgaggctcagtcaggttgtgtaatatncctaagattactcagcttgcaagtaaaatagatggcagtcaaaacaagcactgtctaactgcaaaccccaggctcctgactaatgtgtttccagtgagcaatgttttatggtttttagcacatttactttggatacttatgtataagctcatttgtcatttttcaacctatactttaaaaaatttaagatctcaaatttctttttgatttgcagcattttcattgtcttaaccagctttgccaaattcatttccaatttcttttggtctctttctacaaatatatgctaaagatttttcatcgaattttccacaaattcccacaaaagatactgcaacagtgatgaaaacaaagtctttctttgatgctctatagacataagcatgtatttgttttatttttaggtatgatttttatagtatttttcatttttatgtataattgcttttatttttaggtatgataagtcaaaaatgtcatagggagtatcattgccctaagagactctggtaagaaatttatcaaatgaatgttccatacagaaaattttgaaagagtactacagcaaattttcaaggttgaagacactctgtatgagcagggtgatggaattcagccatttctcatttttatttctcacacgtctttgtgttcctgcatctgccttcagggaagtcgtgtctgggagtctagcaaatttaatagacatatgggtcacgacttagcacttatgttatccaagagtttggttttgattcccacatatagaagagtttctgcacattgttataggaaatataacttttaaaaagctgatgtttgtgagctgcttgtgtacaggaagaagaaactaaaaatgtcttatgtttggaaagtcacacaaatcttaaatcatgattaaaagaggaatcagttaaaatggtccctagttatatgggtgtggctgtggtaaatcattacttttaccctcaagaacaaaaccctatatatgtcaaagacctagggaaaagtaagagttttattacctatcaaaaatcagtatttaggagagattcaactgtatttatattcatcatcatagtattttgaagtactcacttcagcatgaaacataggaaattccaattttacagcatttgcgatcgtgcgttttcttgcttaagacaatataacctgcagagtgtaataccttgacatcactgggtcttccaaacaagttgccgtaaaacataaactatgattattgagtcttaaagaaattatttgctcatgggtactcaagtgatttgaaagttgggatctaagaccacgttaatgaacagaatttgctactttgtatcaacttggaaatatatttcttatttaattttgtagaacaaatatacttcctgggataagtggaggatatattaagtaccctctgatgaattttttcagtgtctagttaacttaacgtttaaattttcaatttgaagaaataaactgggaacagtaatgggacaacagggtgctaacccaataaaaaaagtcactttcagtttgttagtgcatatttatgttgcaatgtaagtttcataattaagtagtgaatctaagttaaaattctgtttacagtttttgcaaatttcaccttggagaattgttgagtgaattgtttgcttcatttgaggatgtagaataaattatattttccataaaatgtcaccaacagtgcttatttccaaacaaaaaataattatgtatgtggctaggtctactcactttgtaatacctcttttggggctcttctgtcagaactgaggacacttacagtatctagagccttttctagggaatataacaaaagcttttctccctcttctagcccccacaaattttacatcttgctgccagcgtatctttcaaaataataacaaggtagtcttcttgagtagtttataatggatttctttctatgtttaataaagcaaatgaaacttaatttttaaaaaaactagaggactaaaaattattttcatgagaactaagtaaaatataattgatatttgtattagtccattctcatggtactatgaagaaatacctgagactgggagattcataaagagaagaggtttaactgactcacagttctgcatggctggggaggccttaggaaacttacaatcatggtggaaggtgaagcaaacacatcctttttcacaaggcgacaggagaagaagcgccgagcaaagggggaaaagccccttatataaccatcagatcttgtgagaacccactatcatgagaacagcatggggataactgcccccatgatttgattacctcccactgggctcctctcacgacacgtgggaattatgggaactacaactcaagatgagatttgggtggggacacagccaaccacatcaatatttaaaattgaagtacttcagttttgattagtgtagactaatacaacatgcgaatgtagaggccttttgctcactcttcccactaagaactcaagacctttgaagggtcctgacaacagacatttcagtgataatttaccaagatagcagaactgtttgttgctaaaaatagttatgcaggataaaatgcaatctataattttatgagaacctgtgattctagtttacctccaattactaatatccatatctatgtttgtatattttttaatcaggtgtgttttggactcagaagttattaaaaattcagtcaaatgatgggagtgatgttttgaagattagaatcatgtagctgattcacatgcgttattagaccatgataagaagcacagaggaaatataacaaatgaaatcagccttcttgcctactgattctgcataattttaaaaattaaatttgggtttttgtccatatgcaaatttgtcctaaaaatttccatcttttgaaagcgttttgatacttagaaaaaaaaatttaagacttttctaaatagaatatacaagatggtacaatctgattggataataatgcatcagtgttctaagttaataattgtctaaggcaataattaacatttaaaacatgcagtgacatcatttctgaatttttttctactttctacttatcaaaatgccaaatataattatacacaattactgcttaaagatgatgaaggttttgatttcagaaagttcatcactcttaccttttcacagagaatttaatttgatgatctattaaggcacaacaggtgtctgatttagcatatttgactattttcacaagtcacaatccatctaacaaggacagatgttcccagtagaggtcagtcttgtgttgatagttattgtatcataaaggaaaaactagggattttatgtttaagtccagtatatttgatataggtagtaagccattaattgtggaagaaagaaacttaaagattggtcatctttattgtaacaaaaattactgtgggtaatattttgggtcctttattaccatatgttttcctcaaaaccccagaaagcttaactgcttgctaaatactccctaaaaggaacttaccaatggtagaaatgaacaattatctaaacgtagcaacagataatttgggataaatgtcagattattggatttgaaactgaaaatatttcttgcaaatttcagtttgagaagagaaacacagaggtaggataatttcacgcatcagcccctcaccttagctgtcttctctgcaatatggggacaactgtgcttgttctctttccctcagataaatcttgttttattcctcagactaatgttttggtctataaaccgagaattttataataaatgcggagatggcaatcggagataaagcatatgtttacaagtaatgcctttggagttgttgatgccaaaatacaataagcagtcaaaccagcatagcccaggaaacatctttgaggttactgagatgataaatgactttactgcaggtagatggtgtgatggaaagagcagtgtgttagcagcagtggttctgccaccagatagcttgaggaggctttaatttcccacaccttaaataaacataattaagtaaactgtgtttgctatgcaaatacagtctaaaagcaagactcctagttccttctttcgaactaaattattacccaacggtccttcctattagaatttgtagcaccaatattagttagaaatcagaatatttggattttaacttgtggcactgccagttgggcaagtgaccttgagcaagtcacaacctctctgagatttgtctttttctcagtaaagtgaagggattggatatggaaggaacaaactccagtgttttccaggacaggaagatattagaagttgctgagaatggaggggtcagtggagaaatggagtgtgcagaccttacaataaggtatctgatagaaacaaagtgttgaatgctctatgttggccaaacttatgctttatgtagaggtgggcagacagatgcaggtaagaaaactgggagagaggtgcccagttacaaatgcaaaacttcaactctggtcttctgtccgatgatctggagttcttcccacttcgccacactaagtcttgtcgctgacaggagtgtgtgggcttgatctaagcaaatctctgaaagagagggcttatatttggttccctttatcctccatctatgccccttctttattttttgggtccctttctctttatccactacatccttagttgtgctcaggtgtttcctgagcatgagctttgtaggcgacacatttcaggagctgaaacagcccagaccccacctctcttttcaggctccccactatgatgttgacatttgccctccacagagcttataccaggctgcattatgtttcttcatgaagactagttagctaagcaagtacttagagccctttcattcattcagtttattgtagagccttaatactgcagatgctaggctgggcaatgatgaagggagaaagacggctttaactctgaaggagcctcagcccaatgaggaaagcaatatgtctacgtgtaactctagatgatgaaatcagacccctgtagtgtgcagggtacacagaggagagataatttttccagggcagtggagggatatgcaaggtgttactgaggagctaatattcaagctgaaccctgaagaatgtgtccactagtgaggaaggcagggcagaggcattttctcagaggaaatagcatgaaataggatctggtgacaactagaaatgacttaccattccatgtggtccaggtaatgctaatacttcaatataaagtctgacatggctctctgtaaaggactgagtaataaggggatttcatgaactgtggccaggcaggcagcggacttatttttaagtaaggagttttttggcacctgtcaaataacatctccgagatggcttcctttacatattccaggtcagttgatccagatctcaatgctctttgcaatttttggattcttagtaggttgctgctacaccatggtttctctttccacattttcacagggcattcctgcattagtctgtactgatgagtttacaatggttgcaataattgttggtgttgatgaaccttccttgcactttatgtaaaagagtgatccttttattgccagtttctatttttccatcaacagcctgatattccatgcctctgggtccatactgttccatttcataacatttaatgaatgttagaagtggctctgcaaatgcattgccttaatcttgttgcctgcagtgagatgcttttaatattttctccacatgtgaactcagtgttttcctttaggttttctttaatttccatgtggttaatgtcactactgcagggagcctggatatttatagatttttccctttcactctatcttcaataatttgcttttgcattcagtgaacacatccatcacaataaatggtccttttctcatttgtattgacttgcatttatataaaccagacttcctttttatagtattatcaatgttcatggcaattttcagtagcttggggagctgggtatgagagttggcacagagctgcaagttttcaaatgactcatgtcatgatgcctggtttcaagctttatcattaagtcaagaccaaagttatatgggtttttttccttaattgcctcaatataaaatgagagtattaaataagcatctctaaattattcccaatttcattaaaatgttcttgatttgatagcccttttgtgcactgaaagatgtaaaatattccaattacattgttgactattcatagtcagttcaatgttataaacttgtatagctcctagtagaaataaacagggaactgagttatatacagttcatattgatcattcttagatgctattgctttctgatagctcaatttattttaacagagtctacaatgatgtcattttaaaattattattttaatatttcatttatattcttttaatataagttaattttttcctatcactgtgcatgtcattggtttgcagattgttgggaagaatatcactggcaggacttgtattgctgttctttaggcaaaagcaaactggtcaacctaatcaaactttttctagcttgtggaaggcctctcagaaaatatctttcagaagtagctctgtgtgctcagacccctggaaccagtcattctgctgcaacagaggcctgtgctttcctattgccacccattttcactgctcagtggcctcttcagatattagtgctatttccataattctagttgcatatgcttttttgtttcttacctatgccacttaaatattgtgacattttgggagcacttaaacatttacttcaaaacttcacatctttgtggtatttttctatagtaacttgtggttgttagaaatgctgaaaataaatggtgctgggataactgggtagttaaatgtggaacattgaaactggacccctttctttcaccatatagcaaaatcaactcaagatggattaaggatttaaatataaaacctaaaactataagaatcctagaagaaacccaggaaatacccttctggacatcagacctggcaaaggttttatgatgaagattctaaaagcaattgcaccaaaaccacaaattgacaagagggacctaattaaacaaaagagcttctgcacagcaaaagaaactctaaacagaataaacagacaaccaacagaataggagaaaatatttgcaaactatgcatctgacaaaggtcaaatatccagaatctataagtaacttaaacaaatcaacaagcaaaaaaacaacccattaaaagtaggcaaaggacatgaacactcatcaaaagaagagagatgaatggatgaatggccaataagcatataaaaatgctccacatcactaatcattagagaagtttaaattaaaaccacagtgagataccgctcataccagtcagaatgactattcttaaataaaagtaaaaaaataacatgctggtcaggttgcagagaaaagggaatgcttatacaactgctggtgggaggtaaattagttcagccacagtggaaagcagtttggctatttctcaaagaacttaaaacagaactaccattcaatccagcaatcccattactgggtatatgcccaaaggaatagaaattgttctaccatatagacacatacatgcttatgttcattgcagcactattcgcagtagcaaagacatggactcaacttagatgaccgtcagtgatggactagataaaggaaatgtggttcatatataccacagaatactatgcagccataaaaaagaatgagagatcatgtcctctgctggaagatagatggagctggaggccattaacctaagcaaattaatatgggagcagaaaaccaaataccacatgttctcataagtggaagctaaacattgagtacacatggacacaaaaaagggaacaagagacactgagacctagttgagggtggagggtgggaggagggtgaggattgaaaactacctatggagtactatgctcattttctgggtgatgaagtaatctgtaccccaaactcctatgacatgcagtttacccataaaacaaacctgcacatgtaccccccgaacctaaaataaaagttggaatggcaaaaaaagaaatgctaaaaatatattatttcattatcccaataagctcttacagtaatttttttatctgtgtggcttttttggggggtatatctccagtataatttaaaataatcagttaatttttgttttctggattcagtcatctttactaccatattaaattatttcgaagacatattttttttctccacattttagcatctctgaaactagaatgcatctttcaattaaggatgtatcacagtttaattggaagcattttttttgtagtggtagaaaaattagttgtgtcctagatttaataaaatgtggcattttatttttattttccaaggacagataatggaaggtggttcatttgtttatgctttgagtaagcattcctgagtattctctgagcttcttttctgtcccaatcttttctatgcaagtctatcttctatcttgttcatttatttattcattctctgcaattagtagaagtatttaacagaaggtaaaaacatttgaaatttttttactctnctctcctaaatttctatgcatatgactttatacctggtcaggccaaagaatttttgtgtagcaggggatgggagaaggagaaattatgggaatagtggtgggattaggacttttataacaagaatgcaaagaagaaccagtgttcagcttttaattactgtaggatgtttctaataatgctggcaatgaggaaagcttgactttgtcaggagaaggaaggattttctaaatttctttaaagctcagatatgtagtaaaagaaaaatttctagaatttcttccagagtctcaaggtactggtttatctagaaagaatgatttggattagagcaagtagatgccctccccttttggtctcatggaataagagtccctgttttttccttaaggtccttgcttttccccttcttaggactgtgtctcaaatggggtgaatgtagaaacatcaggaaaggcatggaggagtctgagaacatttgagctagtggtctgctcctctgtcaaagcatgagggagcacacagacattagttggctccacttcaggcttcaggtctgggacacaatcaatagtgagagagcaatgacatggaggtaaccttggagacagctagaaggattgagactgaggatgtgctcctggctctccagggcctgcgcttggtgtgcagggtattgtgtgggtttccatgcctggagcttttctactgcctcagggacctctgaggccaacagatcagaaaaggctgtatcagagtgaagagactgtaatagaaggagcctttaagactagaggccaggatcagtttctagtagtgtttgtcagcattttccaccccaaaccaagtgtgaacagttttactcattgtaactggtccagggagctgagcaacttacctacctgcagtagaatacagtggagattcagagaacatctcttgaatctgaggtctgcctctctctgtctctgtctctctctctctctgtctctcccttactctgtctctgtctccttccaaaaagaataaagtaaatgtcttcacatacctagatgccatctttgggaggagaagagggtagggacagaactctgaaatgcaagtgtatctgtttgggttcaatcagaagatagagaacatacagtaatctgaacaggggaattttaatataaagataactattaatataaatataattactaaacaaaaataaaagagtagctataagatgtaagaaaacacattattgtaccctgtgactgaatgagagtagtcaggaaagacaaactcggaaggagagccctcttcttgaggctggagttcagacctcactggagaacacgagatgcagatctctggatgttagaggagtttccctggtttgcccatgccagagctggtctgtagtcactgggcaagcagaagtaatcctctggagtgcaggtggggcacaggtgagctgcagctggtggctgggtgggtacgcatgtagagagaatggggatgctggtggcaaccctctggggagtggcagttttcagttacccatggctgtgtaagaggagtgtgctgagggtttgggggtaccagtgtaggcaagaggcctagagtgtgcagtatgcagattgtgagggtgtgggaaggtgatcaggagtcctggcctacgctgtaaggtggccaagggactgcaccttctggactaatggctgaggcagaacaccactggagtcctcacacccacaccgctggcccactgtgcagcagcaagaaacagcagaagagtcatttcctccggcattgcccctccagcacctttaactgtgagagtttagtatcatacacactataaaggagaaatgcttaaaggaattctgttcattatcacagagcatgtattgaatggtgaatttggaactgaaaggtggtaagttgataactggcacaataaatctttattcagaagagactaaatcatccaaaagaaattctaacagctggcactcttttaatgggcttccaatgaacagagttgttggattaaccaatgcattctgtatcctccataaaattgtatatagattcatgtccactgtgtggtgttgactcatagccagttggctgtgctctagtataccattgtacctatgtttccataccatttgggagctgtgtttattctccatatgtttatactagttgtattaagtatctatttattccaagtctatttatagtagttgtattagttttctattttctaacatatttttatttctattttataacagataatctgaaaacttagtgacttaaaacaacaataacaacagtggacatttagtctgccacagtttctgcaaatcttgaattctgttttgcataatctgggtagttctgacttgggggtttctcagatgttgcattcgagttactggatgggcctgcagtcatctgaagacttgactgcagttgtaggaaggaattccaaaatggctcactcatgtggttgacaagctgatgagggctgttgccaggagcgtcagtttgttgccatggagatatctccactaactgagtaccctcatgacatgacagttggcttaccccaagttgggtgatcttaaagatagtgaggcagaagccacaatgccttttataacagtctcaagaagtcacgaagtgtcatttctgcaatatcctgttggttacacagctcaccctttttaatgtagaagaggaccacacaaaagtgttaataccaggagaggccactggaagctgtcttggctactggctaccacactaatatctgttattgtaatcacaaaatttaattaaataccataaaaacaattgaaatatgaatataaaagtatttttttataaaaactaagtgctttcaaaaaacttcttaaagtataaaaaaatctgttgtataaaatgaggctaagacaactaagaaattgaggatattttgtaaaaatctggatggattctgctcccaagtaactttgcaagtgacatgaactttttttattccactttaaagaaattaattggtgatgcaaaaagttttggagtaataaatggcttgaatgttaagggaaaaaaatacccaacccagcatgatacccatatactaagcaccattagggagaaattatcttgctgttctaaagagtaatgaagttaatgtcaattcttgagagataacatttgattgaagaacaagtctacaataccacatcataagctattatctacaaaaatggtaataagagcataggtatgaggttttaataaataatattttacaacaatcagtaatatttgcagcaatgcaactagagtaaaaaattgctgttattggcaaattgacaaaagaggttttagaaataaaaaatatattattaatctaactacagtaccaaaaataaatttggaagaatactgaagttttcatctatcatgacagtagagattaaaaaaaaatcaaaaaacaaccacccaagccatggtgcctatatcagttttcaattgtagcttaaccaaaatcaccctaaaatttagtagtttaaataaatggtttatacaacaatcatattattatctctcgggctctctgtgagtcaggaattcagacagagtacagtagggatgatgggttattttcccactgtgtatagagcctcatctaggaagacttgtaggctgggaatgactcaacagttgggggtctggaatcatctggtggaatctacattcacttgtattgcagttgattctgcttatcatttggaattccagctggtcttgctaaagcacatacacatggctcttccatgtgacctctgtgtttgtttgggcttccttacagcagggtgggtgccttacaagaataaacatcactgagaaaaccagaagaaagctgtattgccatttaggaccttgcctttggaagtctcacagctttactccctttgtaggctccatcttgctcagattcaggtggagggaccatatacaccacatcttgataggagggtgggtatcaaagtcacactgtaagatggtcatgcaggatgggaaatactattgtggcagtcttggaaactgcaatctgtgcacatacacacacacacacactgggaacaatcttacttcctaactgtatgaaccttaaggatgaagatatgtaaaggccatatttttaccactgaatatcatgagaaagtgttttagttccattttgaaaagatggaatatgagaagatgagtttatagaattgataaaattcctcgttgatatggtttggctctgtgtgcccatccaaatctcatgttgaattgtgatcctgagtgttggaggaggggcttggtgggaggtgattagatcatggaggcagatttcccccttgctgttctcatgatagtgagttctcatgagacctggttgtttaaaagtgtggcacttccccattctctcactctctgtctcctgctccaccatggtaagtcatgcttgcttccccttcgccttctatcatgactgtaagtttcctgaggcctcccagccatgcttcctgtgcagcctgaagaactatgagtcaatgaaacctcttttcttcataaattaccaagtttcaggtggttctttttagtttagttgagaactaatacagaaagttggtaccagagaagtggggcattgctataaagatacctgaaaatgtggaagtgactttggaactgggtaatgggcagaggttagaagagtttggaaggctcagaagaagacaggaagatgggaaagtttggaacttcctggggacttggtgaatggttatgaccaaaatgctgatagtgatatggacagtgaagtccaggctgaggtggtctcagatggagatgaacttgttgggaactggaataaaggtcactcttgcaatgcttcagcaaagagactggcagcattgtgcccctgctctaaagatcagtggagcggctggagccaagatggcagaataggaacagctccggtctacagctcccagtgtgagcgatgcagaagacaggtgatttctgcatttccatctgaggtactgggttcatctcactagggagtgccagacagtgggcgcaggtcagtgggtgcagcacaccgtgtgcgagctgaagcagggtgaggcattgccttacttgggaagtggaaggggtcagggagttccctttcctagtcaaagaaaggggtgacagatggcacctggaaaagcgggtcacttccaccccaatacagtgcttttcagatgggcttaaaaaatggcacaccaggagattatatcccgcacctggctcggagggtcctacgcccatggagtctcactgaatgctagcacagcagtctgagatcaaacggcaaggtggcagtgaggctgggggaggggagcccgccattgcccaggcttgcttaggtaaacaaagcagccaggaagctcgaactgggtggagcccaccacagctcaaggaggcctgcctgcctctgtaggctccacctctgggggcagggcacagacaaacaaaaagacagcagtaactctgcagacttaaatgtccctgtctgacagctttgaagagagcagtggttctcccagcacgcagctggagatctgagaacgggcagactgcctcctcaagtgggtccctgacccctgacccccgagcagcctaactgggaggtactccccagcaggggcagactgacacttcacacggccgggtactcctctgagacaaaacttccagaggaacgatcagacagcagcattcgcagttcacaaaaatccgctgttctgcagccaccactgctggtacccaggnaaacagggtctggagtggacctctagcagactccaacagacctgcaactgagggtcctgtctgttagaaggaaaactaacaaacagaaaggacatccacaccaaaaacccatctgtacatcaccatcatcaaagaccaaaagtagataaaaccacaaagatggggaaaaaacagagcagaaaaacaggaaactctaaaaagcagagcgcctctcctcctccaaaggaacacagctcctcaccagcaacggaacaaagctgtatggagaatgactttgacgagttgagagaagaaggcttcagacgatcaaactactctgagctacaggaggaaattcaaaccaaaggcaaagaagttgaaaactttgaaaaaaatttagacgaatgtataactagaataaccaatacagagaagtgcttaaaggagctgatggagctgaaagccaaggctcgagaactacgtgaagaatgcagaagcctcaggagcctatgctatcaactggaagaaagggtatcagtgatggaagatgaaataatgaaatgaagtgagaagggaagtttggagaaaaaagaataaaaagaaatgaacaaagcctccaagaaatatgggactatgtgaaaagaccaaatctacgtctgattggtgtacctgaaagtgacagggagaatggaaccaagttggaaaacattctgcaggatattatccaggagaacttccccaatctagcaaggcaggccaacactcaaatttgggaaatgcagagaacgccacaaagatactcctcgagaagagcaactccaagacataattgtcagattcaccaaagttgaaatgaaggagaaaatgttaacggcagccagagagaaaggttgggttacccacaaagggaagcccatcagactaacagcagatctctcggcagaaactctacaagccagaagagagtggggacaaatattcaacattcttaaagaaaagaattttcaacccagaatttcatatccagccaaactaagcttcataagtgaaggagaaataaaatactttacagacaagcaaatgctgagagatttcatcaccaccaggcctgccctaaaagagctcctgaaggaagcactaaacatggagagaaacaaccggtaccagccactgcaaaatcatgccaaattgtaaagaccatcaaggctaggaagaaactgcatcaactaacaagcaaaataaccagctaacatcataatgacaggatcgaattcacacataacaatattaaccttaaatggaaatggactaaatgctccaattaaaagacacagactggcaaattggataaagagtcaagactcatcagtgtgctgtattcaggagacccatctcatgtgcaaagacacacgtaggctcaaaataaagggatggaggaagatctaccaagcaaatggaaagcaaaaaaaagcaagagttgcaatcctagtctctgataaaacagactttaaaccaacaaagatcagaagagacaaagaaggccattacataatgtcaaagggatcaattctaccagaagagctaactatcctaaatatatatgcacccaatacaggagcagccagattcataaagcaagtcctgagtgacctacaaagagacttagactcccacacaataataatgggagactttaacaccccactgtcaacattagacagatccatgagacagaaaattaacaaggatgtccaggaattgaactcagctctgcaccaagcggacccaatagacatctacagaactctccaccccaaatcaaaagaatatacattttttttttcagcaccacaccacacctattccaaaattgaccacatagttggaagtaaagctctcctcagcaaatgtaaaagatcagaaattataacaaactgtctctcagaccacagtgcaatcaaactagaactcaggattaagaaactcactcaaaactgctcaactacatggaaactgagcaacctgctcctgaatgactactgggtacataacgaaatgaaagcagaaataaagatgttatttgataccaatgagaacaaagacacaacataccagaatctctgtgacacattcaaagcagtgtgtagagggaaatttatagcactaaatgcccacaagagaaagcaggaaagatccaaaatttacaccctaacatcacaattaaaagaactagaaaagcaagagcaaacacattcaaaagctagcagaaggcaagaaataactaagatcagagcagacctgaaggaaatagagacacaaaaaacccttcaaaaaattaatgaatccaggagctggttttttgaagagatcaacaaaattgatagaccgctagcaagactaataaagaagaaaagagagaagtatcaaatagatgcaataaaaaatgataaaggggatatcaccaccaatcccacataaatacaaattaccatcagaggatactacaaacacctctacacaaataaactagaaaatctagaagaaatggataaattcctggacacatacaccctcccaagactaaaccaggaagaagttgactctctgaatagaccaataacaggatctgaaattgtggcgataatcaatagcttaccaaccaaaaaaagtccaggaccagatgaattcacagccgaattctaccagaggtacaaggaggaactggtaccattccttctgaaactattccaatcaatagaaaaagagggaatcctccctaactcatttgatgaggccagcatcatcctgataccaaagcctggcagagacacaaccaaaaagagaattttagaccaatatccttgatgaacattgatgcaaaaatcctcaataaagtactggcaaaccaaatccagcagcacatcaaaaagcttatccaccatgatcaagtgggcttcatccctgggatgcaaggctggttcaatatatgcaaatcaataaatgtaatccagcatataaacagaaccaaagacaaaaaccacatgattatctcaatagatgcagaaaaggcctttgatagaattcaacaacccttcatgctaaaaactctcaataaattaggtattgatgggacgtatctcaaaataataagagctatctatgacaaacccacagccaatatcatactgaatgggcaaaaactggaagcattccctttgaaaactggcacaagacagggatgccctctctcaccactcctagtcaacatagtgttggaagttctggccagggcaattaggcaggagaaggaaataaagggtattcaattaggaaaagaggaagtcaaattgtccctgtttgcagatgacatgattgtatatctagaaaaccccatngtctcagcccaaaatctccttaagctcataagcaacttcagcaaagtctcaggatacaaaatcaatgtacaaaagtcacaagcattcttatacacaaataacagacaaacagagagccaaatcatgagtgaactcccattcacaattgcttcaaagagaataaaatacctaggaatccaacttacaagggacgtgaaggacctcttcaaggagaactataaaccnntgctcaatgaaataaaagaggatacaaacaaatggaggaacattccatgctcatgggtaggaagaatcaatatcatgaaaatggctatactgcccaaggtaatttatagattcagtgccatccccatcaagctaccaatgactttcttcacagaattggaaaaaactactttaaagttcatgtggaaccaaaaaagagcccgcattgccaagtcaatcctaagccaaaagaacaaagctggaggcatcacggtacctgacttcaaactatactacaaggctacagtaaccaaaacagcatggtactggtaccaaaacagagatatagatcaatggaacagaacagagccctcagaaataatgccacatatctacaagtatctgatctttgacaaacctgagaaaaacaagcaatggggaaaggattccctatttaataaatggtgctgggaaaactggctaaccatatgtagaaagctgaaactggatcccttccttacagcttatacaaaaattaattcaagatggattaaagacttaaatgctagacctaaaaccataaaaatcctagaagaaaacctaggcattaccattcaggacataggcatgggcaaggacttcatgtctaaaacaccaaaagcaatggcaacaaaagccaaaattgacaaatgggatctaattaaactaaagagcttctgcacagcaaaagaaactaccatcagagtcaacaggcaacctacaaaatgggagaaaatttttgcaacctactcatctgacaaagggctaatatccagaatctacaatgaactcaaacaaatttacaagaaaaaaacaagcgaccccatcaaaaacaaaagccaaaattgacaaatgggatctaattaaactaaagagcttctgcacagcaaaagaaactaccatcagagtcaacaggcaacctacaaaatgggagaaaatttttgcaacctactcatctgacaaagggctaatatccagaatctacaatgaactcaaacaaatttacaagaaaaaaacaagcgaccccatcaaaaacaaaagccaaaattgacaaatgggatctaattaaactaaagagcttctgcacagcaaaagaaactaccatcagagtcaacaggcaacctacaaaatgggagaaaatttttgcaacctactcatctgacaaagggctaatatccagtatctacaatgaactcaaacaaatttacaagaaaaaaacaagcgaccccatcaaaaagtgggtgaaggacatgaacagacacttctcaaaagaagacatttatgcagccaaaaaacacatgaaaaaatgctcaccatcactggccatcagagaaatgcaaatcaaaaccacaatgagataccatctcacaccagttagaatggcgatcattaaaaagtcaggaaacaacaggtgctggggaggatgtggagaaataggaaaagttttatactgttggtggcactgtaaactagttcaaccattgtggaagtcagtgtggcgattcttcagggatctagaactagaaataccatttgacccagccatcccattactgggtatatacccaaaggattataaatcatgctgctataaagacacatgcacatgtatgtttattgcagcactattcacaatagcaaagacttggaaccaacccaaatgtccaacaatgatagactggattaagaaaatgtggcacatatataccatggaatactatgcagccacaaaaaatgatgagttcatgtcctttgtagggacatggatgaaattggaaatcatcattctcagtaaactatcacaagaacgaaaaaccaaacaccgcatattctaactcataggtgggaattgaacaatgagaacacatgaacacagaaaggggaacatcacactctggggactgttgtggggtggagggatgggggagggatagctttaggagatatacctaatgctaaatgatgagttaataggtgcagcacaccagcatggcacatgtatacatatgtaactaacctgcacattatgcacatgtaccctaaaacttaaagtataataataaagtaaaataaaaaaaaaaagaagttttacatataaaaataaatacatatgtaaagatctgtagaattttgaacttgagagagataatttagggtatctggtggaagaaatttctaagcagcaaagcattcaagagatggcctgactgcctctaaaagcctaattcatttgcataaacaaagaaatgacctgaaactagaacttgtatttaaaagggaagcagagcataaaagtttggaaaattttcagccagaccatgcagtagaaaagaaaaacaattttctagggaggaattcagggctgcagaaataagcataagtaacaaggagtcgaatgttaatagcaaaaacaatggggaaaatgcctccaaggcatttcagaggcctttgtggcagcccctccaatcatagtcctggaggtctagcagggaaaaatggtttcatggaccaggcccaagaccccgctgctctctgcagccttgggacatggtgccctgcatcgcagctgctccagttccagctgtggctaaaaggggccaaggtatagcttgggctgtttcttcagagagtgcaagctccaagccttggtggcttccaagtgtattgggcctgtgagtgtgcaaaaggtaagcgttgaggtttgggaacctttgcctagatttcagaggatgtatggaaactcctggatgtccaggcagaagtgtgctgcaggggtggagccctcatggagaccctcttctagggcagtgcagaggggaaatgggaaatgtggggttggagcccccacacagagtccctcctggggcactgcctaatggagctgtgagaacggggccaccatacttcagacctcagaatggcagatccactgacagcttgctctgtgtgcctggaaaagctgtaggcactcaacaccagcctgtgaaagcagccatgggggctgtattatgcagagccacaggggtggagctgcccaaggacttgagcccactgcttgcatcagtataacctggatgtgagacatgaagtcaaaggagataattttgaagctttgagatttaatgactcccctgctgggttttggacttacatggagcctgtagcccctttgttttggtcaatttctttcttttggaatgggagaacttactcaatgcctgtactctcattgtatcttggaagtaactaacttgtttttgattttacaggcttataggcagaagggacttgccttgtctcttcaaagagtctcatctttgtctctcataaaagatgagactttggacctacacttttgagttaatgctagaatgagttaagactgttgggaaggcataattgtgttttgaaatataagaaggatatgtgatttgggaggggccaggacagaattatatggtttggctttgtgtccccacccaaatctcatgtttaattgtgatcttaagtgttggaggtggggccttgtgggaggtaattagatcatgggggctgatttcccccttgccattctcatgagacctggttgtttaaaagtatgtagcacttccccctttgctcactctcctgctccactatggtaagacatgcttgcttcccctttacctctgccatgattataagtttcctgaggcctcccagccatgcttcctgtacagcctgcaggactgtgagtcaattaaaactttcttcttataccatttgatccagcaatctcattactgggtatatacccaaaggattataaatcattctactataaagacacatgcatacgtatgtttattgcaacactatttacaatagcagagacatggaaccaacctaaatgcccatcaatgatagactggataaagaaaatgtggtacacatacaccatggaatactatgcagccataaaaatgaatgagatcatgtcctttgcagggacatggatgaagctagaaggcataatcctcaccaaactaacacaggaacagaaaaccaaatatcgcatgttctcactcataagtgggagttgaacaatgagaacacatggacacagagagcggaaaaacacacatccaggcctgttgggatgtggggggtgaggggagggaacttagaggataggtcaataggtgcagcaaaccaccatggcacatgtgtacctatgtaaggaacctggacattctgcacatgtatcccattttttagaagaaatcaaacaaacaaacaaaaaactcatttccttgtaaattgctcagtctcaggtagttctttatagtaatgtaagaaaagactaacatcaaaggtcactattcacagtgcagtactggagtgaaatgtgttaagaaaaagatttcctaaacttggaaatagccatattggagaaatgtgcaacagatccatcattgatgatttaattatttaaggctgttaactttgatttaacgctattgattgggatatttacaactctatgcatagatggtgacttatgaaaactgagagtggtgcaaataaattcttcccagtagaaaagaacactccaggggatatagttaatgcaagacattaaccagttttatatctcttttagcattttttattcagtcatcttttttcaataactataaatacttctgcttctgctgtattcttttttctcaccttttctattttattggttcccataataatgagttaaataaatctttgatacatgcttactttattttatatgagagtcaggtttttaaaattatactttgacaaatgaaagtcctcagtgaacatgtactacatcttgaaaaaagggatggcctggggctgataatactataaaacaagagttgacagactatggccccatgggtcaaatgcacttgtaagaacgttttattggaacatagacacactcattgattatgtcttgtctatgggttttgttctgctatagcagaattgagtagttgcaactatgatcatatggcccataaggcctaaaatatttattatctggccttttacagaaaaattttgctaaattctgttataggaaatcctgaattttaagactaatcatgaacataatttgttaatcgttctcagaaaattgacagcactaatgatttataagacatcaaacaatagaatatttaatttgatttactagaaaattatgaataatgcagaataatatatactctgaattaaacttattgatctcaatttggaaaacagaaaacaatgaagagatataatcaaatctagagccaaaagtggccaataactacctaaatattaccatatattaaacatcagatggaatcaactgtcaagaatataattaaaaaggtggaaggactatgctgtgaaaaaaatctatcatcttaacaacttgaactcatttttattaaatgtatatacatttagtttaaatgaaaatatagtatttgtgttatatactttatttctcactttgactttttaattaaatatgtcttgatttcatcagataagaaggcatctggtgtattaagttttgttaattgaaaaatctcaacttttttattgcccagcagggtagaggcttgctcagaagcttggactagcaaacataactagctttttttttttttttttgtctttccttctcttttctctcctgccaccttaatgtagggtgaatgaatttgccacctcaaagctatctacaatgggtcaggcaaaataaccacaatatgggtttgtacataatttgggaaggagttcttctcctgtcccttcttcctttggcaatgcctcttaaatcacagttgtgttggttgaacagctctatgaatatatgaaaagccactgaattgtgcacttaattgggtgagttgcatggtatgtaaaatacatcttaataaagctgacaccccaagaaaatcacaggagaaaaaaaatcgtaccgagttaatggtatataatgaaaaagaaaaattgatgttcagtgcctactgtgtactagaaacttacaaatggacagatatatgagtatcaaaatcaaaagtgcacagcaacctaaaacagctctgtcacccaggctgtagtgcaatggcctgatcatggcctattgcagcctttgccaaaggagctcaagggctcctcccaccccagccttcggagtagctgggactacaggcatgcaccaccatgcctgggctaatttttttttttttttttttgtagagatggagttttatcatgttgtccaggctggccttgcactccttgactcaagccatctgcccatctcagcctctcaatgtgctggggttagagggatgagccaccatgtctagcatagagttgtattttctaggtttaaagtaattaaattatggatctgcaagcccaaataatttttataagttataatttttcttattaattataaagtattcccagggactctgtgaagtcctgttatgtctgggctcacgtatgaggcacacaaggcaggcagtaatgagactgcttttaatctgtaaatatataagtaaacattcaaattaattccattattttaaagagtgagattaagaaatgttaaaatgcactcattttaacaatgtttccattgtgcaaaacatttttggcattatttgtctttttcaggcaggaaaaccagtgtcaaaactttataatcatgtcttatttctgtgtgtatgtgtccacataaagtattaattagcatcattgcttgtttccaaatgccttttgtctgtttcaaaactcaaatctaccattaaaggaaaaaaaaattcacacaattgagaatattccaaagaatgggcctaatggggatcacagaactgattggaagactgagactgaagatctaggctcagaaatttggcatgaatcttggcagtaggtgacacagttcaggtcacaccacaaagcaatctggtgtagcatgtctcactggcatggccaccattagactttatcctcactagcaccaattggcaatggagtgttgtaccacttcctttagatgcagtcatcccaggtgggagtgttcgtgcaagccaagcttatgtgccatgcaccagatgtcagtggatgggggtgtgtgaatctgttaggtagcagagcacagtttgccaccaaaatatacacaatgtagcatttccccacaattgcccattaaaaatcttttacattaagcattactgacattatagaagtgtctttggattcttttattagttaaggtgagcatatattacgtttgtaattttaagtcgagtacataataattataaaagagagatttttattctttcaagtttcaggtacagagatagtctctttgcttcgatatagggtacactagagagggttgtacacctcagttcattgctccacactctcccagcagggagcatagaaccttgacctttagaacattccacttaatggtgcaataacctgtatgcagtgtaagctggtaggagaaatcaagtaagaagaggaaagaaatggccataaaatgcccacacatttcctcttcgcccccacccgcccctccaatcataagtgatgctccattgggcactctttacctcaacttaagtttcacctttttctggtttggaaagggaaaactacgtttttttgttttgagacggagtcttgctctgtcacccaggctggagtgcactggtgcgatctcggctcactgcatcctccctcccaggttcaagtgattctcctgcctcagcctcctgagtagctgggattacaggtgcccgccaccacacccggttaatttttgtatttttagtagagacgggatttcaccatgttggccaggatggtcacgaactcctgacctaaggtgatctgccctccttggcctcccaaagtactgggattacaggcgtgagccaccgcgcccatccaaactacatttttaaaaaaagttaaaaagcaaaaacgaaacaaaagttgggaaggcaagtgttctgttccatttcattaggaggctgactctctaggaacctctcctggtcgctgggaccattgttacaaggttgagaactgtgagtgtacggaaacccaggggaaacatttttcctcatttacttctcaaaatagaggtaggaataaggcatggaaaaatataaatgagtaaatataatccttgttaccttggaataattggtgataaagtgcaggtgcatcttattttcattctatcaagtcgttttctaattggatgttcttgaaacagtggctcattgcttgtacttgttcactcctattttcttgctactatcctgttttgggggcagggcaactctaccctggggaacgatcaaatgtttaggcaaatatatcctggtgttataagctcattaaatttcttgtcatttcttgcagtgtgctgggaagtgctgtttgtggcccgtttttgcaatgtagaacctctcttttgtgagagccatggaagttccttatttgataattagtctcttgctttaggcagtgccattaagaactccatataagctgccaacactttgtggatgtgcagaaccccgtaagcttcctatagctactattgcaagtaaaattttcagatgcttctgaagtcttacccacttatcttggcgtagaggttctcaagcttcagcactggaggatcacctggaattgctcgttaagacacacattgctgggatccacctccagggtgtcagagtcaagtctggggtgaagcctgagaatgtgcatgtctaaccagttcccaggtgatgctgatgttgctggttttgagactatattttgagattaagaactgccttggattaagagctgacctgcgatctacagctcaaatagtgaagtaaacatcctaaagaaaatggaaaaaccagtgcagtgagtgattgaattactatttgttcaatatcacagagagcatagtattacataagggctttggggaatattttaggtaagtatatataactcttgccacctaggatgttcatagtaactataagacagtatttttgttttccaagtaattttaatgatcctgtagatcctcttcctttttgtatataatatcaatctaatagtttcttgtttaatataaaaatgaaatcttattttacacaagcagcaagcagctattttttcagattttccccctataatctaagggaaagttattttaaaatagaaaagatgtgggcttcaaaaaaagctttgcaaatatgttgcaataatacgaatgatttcagtgttgaaatccatttgtgaaagcaggctttgcttatattttgggtcctgccttctataaaatgctcagatttgcttttattaagatcatacactcagtgacctgaggaccagatggaggttataagcagctctttaaggcttcagagcttagcctagagagtcaaacagctctttgaactggcgtctcagctctgtcatttaggcaaattgtttattttctgcaaagaaccagccttaggctttgttgatctacgtatgtatatttgttttttatttatttgcattatttcattcattctgttttctttgactttaatttgctagttttctttgaagcttgtgagataaatgcttagatcattgattatcaaaattgtgtctattctaatatatatataatatatatatgataaggctatacattttccccttagcacagctttagtagcctccaacaaattttgatgtgctgtgtttttattataaatcagtttgaaatatatattctaattttattatgatttcttgagcctatggattatatagaaatatatttcttaaattgtaaacatatggggattatttgatgtctctaagccgcagatttcctattttattttatttatttattttttattattatactttaagttttagggtacatgtgcacaatgtgcaggtttgttacatatgtatacatgtgccatgatggtgtgctgcacccattaactcgtcatttagcattaggtatatctcctaatgctatccctcctctctccccctacgccacaacactccctggtgtgtgatgttccccttcctgtgtccatgtgttctcattgttcagttcccacctatgagtgagaacatgcggtgtttggttttttgtccttgcaatagtttgctgagaatgatggtttccagcttcatccatgtccctacaaaggacatgaactcatcattttttatggctgtatagtattccatggtgtatagtattccatggtgtatatgtgccacattttcttaatccagtctatcacttttggacatttggcttggttcgaagtctttgctattgtgaatagtgctgcaataaacatatgtgtgcatgtgtctttatagcagcatgatttataatcctttgggtatatacccagtaatgggatggctgggtcaaatggcatttctagttctagatccttaaggaatcgccacactgatttccacaatggttgaactagtttacagtcccaccaacagtgtgaaagtgtttctatttctccacatcctctccagcacctgttgtttcctgactttttaatgattgccattctaactggtgtgagatggtatctcattgtggttttgatttgcatttctctgatggccagtgatggtgagcattttttcatgtgttttttggctgcataaatgtcttcttttgagaagtgtctgttcatgtccttcgcccactttctgatggggttgtttgtttttttcttgtaaatttgtttgagttcattgtagattgtggatattagccctttgtcagatgagtgggttgcaaaaattttctcccattcagtaggttgcctgttgactctgatggtagtttcttttgctgtgcagaagctctttaattagatctcatttgtctattttggcttttgttgccattgctcttggtgttttagacatgacgtccttgcccatgcctatgtcctgaatggtattgcctaggttttcttctagggcttttatggttttaggtctagcatttaagtctttaatccatcttgaattaatttatgtgtaaggtgtaaggaaggcatccagtttcagctttctacatatggctagcccgttttcccagcaccatttattaaatagggaatcctttccccatttcttgtttttctcaggtttgtcaaagatcagaaagttgtagatatgcagcattatttctgagggctctgttctgttccattggtctatatctctgttttggtaccaataccatgctattttggttactgtagccttgtagtatagtttgaagtcaggtagcatgatgcctccagctttgttcttttggcttaggattgacttggtgatgcaggctcttttttggttccatatgaactttaaagtagttttttccatttctgtgaggaaagtcattggtagctcgatggggatggcattgaatctataaattaccttcggcagtgtggccgttttcacgatatcgattcttcccacccatgagcatggaatgttcttccatttgtttgtatcctcttttatttcattgagcagtggtttgtagttctccttgaagaggtccttcacatcccttgtcagttgaattcctaggtattttattctctttgaagcaattgtgaatgggagttcactgatgatttggctctccgtttgttattggtgtataagaatgcctgtgatttttgcacattgattttgtatcctgagacttttctgaagttgtttatgagcttaaggagattttggtctgagacgatggggttttctagatatacaatcatgtcatctgctaacagggacaatttgacttcctcttttcctaattgaatgccctttatttccttctcctgcctgattgccatggctagaacttccaacactatgttgaataggagtggtgagagagggcatccctctgtcttgtgccagttttcaaagggaatgcttccagtttttgtccattcggtatgatattggctgtgggtttgtcatacatagctcttattattttgagatacgtcccatcaatacctaatttattgagagtttttagcatgaagggttgttgaattctgtcaaaggccttttctgcatctattgagataatcatgtggtttttgtctttgattctgtttatatgctggattacgtttattgattttcatatgttgaaccagccttgcatcccagggatgaagcccacttgatcatggtggataagctttttgatgtgctgcttgattcggtttgccagcattttattgaggatttttgcatcagtgttcatcaaggatattggtgtaaaattctctttttttgttgtgtctctgccaggctttggtatcaggatgatgctggcctcataaaatgagttagggaggatgccctctttttctattgattggaatattttcagaaggaatggtaccagctcctccttgtacctctggtagaattcggctgtgaatgcgtctggtcctggactttttttggttggtaagctattattattgcctcaatatcagagtctgtttttggtcttttcagagattcaacttcttcctgatttagtcttgggagggtgtatgtgtccaggaatttatccatttttttctagattttctagtttatttgtgtagaggtgtttatagtattctctgatggtagtttgtatttatgtgggatcggtggtgatatcccctttgtcattttttattgcatctatttgattcttctctcttttcttctttattagtcttgctagcggtctatcaatttgttgatcttttcaaaaaaccagcctctggattcattgattttttgaagggttttttgtgtcgctatttccttcagttctgctctgatcttagttatttcttgccttctgctagcttttgaatgtgtttgctcttgcttctctagttcttttaattgtgatgttagggtgtcaattttagatctttcctgctttctcttgtgggcatttagtgctataaatttccctctacacactgctttgaatgtgtcacagagattctggtatgttgtgtctttgttcttattggtttcaaagaacatctttatttctgccttcattttgttatgtactcagtagtcattcaggagcaggttgttcagtttccatgtagttgagcggttttgggtgagtttcttaatcctgagttctagtttgattgcactgcggtctgagagacagtttgtcataatttctgttcttttacatttgctgaggagagctttacttccaactatgtggtcaattttggaataggtgtgatgtggtgctgagaagaatgtatattcttttgatttggggtggagagttctgtagatgtctattaggtctgcttggtgcagagctgagttcacttcctgggtatccttgttaactttctgtctcatggatctgtctaatgttgacagtggggtgttaaagtctcccattattattgtgtgggagtcttagtctgtttgtaggtctctaaggacttgttttatgaatctgggtgctcctgtattgggtgcatatatatttaggatagttagcttttcttgttgaattgatccctttaccattatgtaatggccttctttgtctcttttggtctttgttggtttaaagtctgttttatcagagactagggttgcaacctgtgactgtttttgttttccatgtgcttggtagatcttcctccatcccttattttgagcctatgtgtgtctctgcacatgagatgggtctcctgaatacagcacactgatgggtcttgactctttttccaatttgccagtctgtgtcttttaattggagcacttagcccatttacatttaaggttaatattgttatgtgtgaatttgatcctatcattatgatgtcacctggttattttgctcgttagttgatgcagtttcttcctagccttgatggtctttacaatttggcatgtttttgcagtggctggtaccggttgttcctttccatgtttagtgcttccttcaggagctcttttagggcaggactggtggtgacaaaatctctcagcatttgcttatatgtaaagtattttatttctccttcacttatgaagcttagtttggctggatatgaaattctgggttgaaaatccttttctttaagaatgttcaatattggcccccactctcttctgggttgtagagtttctgcagagatatccgctattagtctgatgggcttccctttgtgggtaacccgatgtttgtctctggctacccttaacattttttccttcatttcaactttggtgaatctgacaactatgtgtcttggagttgctcttctcgaggagtatctttgtggcattctctgtatttcctgaatttgaatgttggcctgccttgctagattggggaagttctcctggataatattctgcagagtgctttccaacttggttccattctccccgtcactttcaggtacaccaatgagacgtagatttggtcttttcacatagtctcatatttcttggaggctttgttcatttccttttactcttttttctctaaacttctcaattcatttcattcatttcatcttccattactgataccctttcttccagttgatcgaatcggctactgaagcttgtggatgcatcacttagttctcgtgccatggttttcagctccatcagttcatttaaggacttttctacactggttattctagttagccattcgtctaatctgttttcaaggtttttagcttctttgcgatgtgttcgaacttccttctttagcttggagaagtttgatcatgtgaagccttcttctctcaacttgtcaaagtcaatctccatccagctttgttctattgctggtgaggagctgcattcctttgcagggggagaggtgctgtgatttttagaattttcagcttttctgctctgttttttccccatctttgtggttttatttacctttggtctttgatgatggttacgtacagatgggggttttgttgtggatgtcctttctgtttgttagttttccttttaacagtgaggaccctcagcggcaggtctgttggagtttgctggaggtccactctggaccctgtttgcctgatattaccagcagaggctgcagaacagcgaatattgctgaacagcgaatattcctgaacagcaaatattgctgtctggtagttcctctggaagcctcatctcaggtgggtacctggccatgtgaggtgtcagtctgtccctacttgggggtgcctcccagttaggctacttgggtgtcagggacccacttgaggatgcagtctgtccgttctcagatctcagactccttgctgggagaaccactactctcttcaaagctgtcagacagggacatttaagtctgcagaggtttctgctgccttttgtttggctatgccctgcccccagagttggagtctatagacgcaggcaggcctccttgagctgagatgggctccacccagttcgagcttcccagccactttgtttacctactcaagcctcagcaatggtggggcgcccctcccccaaccttgctgctgccttgcagttcgatctcagactgctgtgctagcaatgagcgaggctccgtgggcgtgggactctccgagccaggcncgggatataatctcctgatatgccgtttgctaagaccattggaaaagtgcagtattagagtcggagtgacctgattttccaggtgccgtctgtcacagcttcgcttggctaggaaagggaattccctgaccccttgtgcttcgcaggtgaggcgatgcctcaccctgcttcagctcacactcggtgcactgcacccactgtcctgcaccctgcagtgtagcaaagtttgaaatgtagatagccagaagtcagtctgggggaaagcaattccaattttcaagcttgtaaaattgttttcattgatttctactcaaatttgaaattctttcctgtcgtcaacatgtttgatgatgcctaatatgagctacaaattcactataccatttttttcttttttgctggaacatgtataaaatagaatatatctgaatttccatgtagggctgaaacatgctgtcataatagaaacaatatgcctacatctccgtctctctttctgtgtgtgtgtgtatgtatgtgtgaagtcatatgttttatgctttcctatatatcagattatgttttagcatttcagaggcactgtgtcctgctaaaatcctgtgtttccagatgaaatggcaaacattatttccagcaatgtgataaaacaaccaaagaaagtgttcaagtgacccgattcataaaattcaccaataagtcaatatatgcagtaaaatagttattacaagagtagctaagagtaattaatatgagtaagtctgtagcttaacacagtaaagtatcacttttaaatgcatttgcatttctcatgggtgagggttagcaaattctgacctggaaaccaaatccagcctactgttttatttgtaaaaaattacatttgaacacagtcctacccatttattaacttactgtttatcactgcttttgttctagaaaagcagagttgagtagttgaaaaaaagactgtggccaggcacaatgtctcataccataatcccagcactttgggaggccaaggtggatcactaactggtcactaactcttgggctcaagtgggtggattactttagcccaggtgttagtgaccagcctgggccacatggtgaaaccctgtttctacaaaaagtacaaaaattagccgggagtggtggtgtgaacctgtagtcccagctactggggaggctgaggtgggaggatgacctgagcctgggaggtcaagtaaggctgcagtgaactgagatcatgccactgcactccagcctgagtgacaaagtgagatcctatctccaaaaaaaagaaaaaaaaaaagactgtaatataagacccccaatgtcaaaaatatttactatctgatcctttacaaaagcgtttgctaactcctgtccttgtgtatgctttgatttcatattaattatatcttatgttatttatgatacatatatganatacacatatatatctaatatgttatatatttaagaattattcactatgccacaaactgtagatacaaaagaagtatctctagggaaagccaaaaacaaacatggaaagaaagaaggctagcagaagcttcaaaatatcaaaaactctcttactgtgtggcaatataaactaaaaactgatgctcaaaatcatgaagataggaaaaagaatcaagacaaccaaaaaatatggttaataaaaatgaagacagaagacatcaagatgtttatgagaaccagggtcctttcaaacagggggtgaaaaaggagtgagaagatgtgcatggcagtgaagaagaacttaatttgcacacagtcaacgggggggtgggcaggagggccaacacagctgcatttctaccacattatttattttggtaagtactgtcatcttttgttatgagccatatttcattcaacagtgtttaatgacttttttccaaatcattactccataatatttactgagaatcaaacagaacttacaatagaaaaaagagatacttcttaattagatattttggaaaaaaatcattgtcgtgtgacaagacaaccaaagagtagtcagctaaacctatagaaatgaagtattctaaaaatgtgtcagacagctaattaacacaatattttatttttctaaagatcttgcagtgtttgtcatctttatcaccttttaaaagtttgcattttattgtcacttttaaaatttttaaataaatgtccattttgtatctatcattctgtgtctttatgtaatagtatctaatattctatatctgtatcaaatattctgtatgtacttcatattcattttatcttattttatttatttatttatttatttatttatttatttattttagacagagtcttactctgtcttccaggctggagtgcagtagcacaatcttggctcaccacaacctccacctcccgggttcaagcaattaccctgcctcagcctcctgagtagctggggttacaggcacacgctaccatgtccaggtaatttttgtatttttagtagagatgggttttgccatgttgaccaggctggtctcaaactcctgacctcaagtgatctgccccccttggcttcccaaagtgctggaattacagatatgagccaccacatccagccccattttaccttaatttgtaagaatatataattatatttataattttattcattttatattaatttttctatttcttaaaggctaaatctctagtttcctttttatttttcaggtagaggattttaattcactgagtacctgatcattttacatacctagtcaaataaatatgaaatttgaagaactaagattaagttttaaaaattcttaagtgcatacaatccattgaagaaaacaaaaattgcttaagcagtttttaaaaccttgataagaggtcatcaacatgatttaaatgtgaaattagctaatgtaagtagcagttagaatgagatttagcttatatatttggaggtataatggaaaactctggtgaggactcttttattgcacaccaagagaaacatgagaaagaaaaatgagttgcatttttctgcatttttccagaagtgaaatgctttgcaacatcctcagaaagaaagagaatacatgagtaatatgaaagaaaactatataaaggatttaattatttccaaattgcctgggtgtttttttagtgcctgctttttttttcaagcaggaataactgtagaaacttttatttatttatttttaaaggaatggttactattcttaggaaaagtggcagtaaatatagttaataacggtaattataattttataaactcattcaaaagtcttgattttaaaggcgatagtaaaaaaaatatatatctatttatcttgttccctgaaaaatggtagcactcctgaccactgagagactgttctcctcggcataattgatggccttcaaagccatcatacttcagtattcaatgtcaaagatttatttccatttgcaaaatttgcttagaactcacctatatttacctttcctcttatgacttataagataatattaacatctacataacagaatctcactcacagaatgtttgagccacgaaggtgctctgagaccctctgcctcaacagcctcattcatagatgagagaagcccagagaggtgaggacgccttccaaagctctagcacttgtttctagacatggaaccaggacagcccttggcatttcccaccacattttcctgcttattatgtggcatgagcttgtctttaacactgaattagaattattgcacattacattgcattcatcaaggcctacccttcaggcagtctgatgtaacagtctattataagacatccgagaaaaaccatccactatcctttcagatgttctcaaaacaatttgtattaagagctaataaaatgaaacagaaaatgccaggtaaactttttaaaataaagattttgtgattcattgggtttaattattggttttattttagcattactttgatacatttcatgaagtatacagacagaactaaagccacatttaaaaggcaattaataaaacccagacattatgatataatttacatacatttagatatatttaaagtgtacagttcatttatttagtataaccacagagttgtgcaaacatcaccaccatctaattctagaacatgttagaaccccaaaagaaacttcatattcattagcatgttgcattcctggcagctccctcttgccaccctgtaccctcagtcctaggcaaccactaaacaactttctgtcctcatagacttgtctattctagacatttcctataaatggcatcatacgatatgtggtattttgtgactggctctggcttctttcacttagtataatgctttcacatttatcatgtagcatttgtaagtgtctttcccttttatagctgagtaatattccattgtatgtgtattccacatctttatttatccattcatcacttgatgaatatttggatggttttcactttttggctactatgaacaatgctgccatgaacatttgtgaacaagttttagtgtggcattatgtttccatttcttttgggtacatatctagaaatagaattactgggtcatagggtgactctatgtttaatattttgaggaattcccagactgtttgcaaagtgactgcatcatcttacaatctcaccagtaagtatggcatgaggattccaatttcttcacagccttgtaaaaaggaaaattttacaattataattatttggcaaaaattcaatgaattttttgagcatctattttgtgaaaggtcttttttgaggtgctataattttttaacactatcaatttttgtggaaaaaattagaacttttctaaaggacattatttttaaagtttattacttattatttattaatttttattaatacataatattgctatgtatcaggtacatgtgatagtttgatacatgcatacagtatataatgatcaaatcagcatatttagaaaatccattacctcaagcatttatttctttgtgtttggaacatttcagaacttctctttcagctattttgaaatatgcaatatattttttgttaactatagacactctattgtgctattaaacactagaacttatttcttccacataactgtatgtttgtacccattaaccaatctgtcctcatccccccagccctttcccagcctctggtatctatcattctattccctacctccatgaggtcaactttttagctcccacatatgagtgggaacatgtgatacttgtttttctgtgcctggtttatttcactaaacataatgacttgcaattccatccctgttgccgcatatgatgagatttcatttttaatggctgaatagtattttgttgtgtatatataccatattttctttattcattcatctgttgatggacacttaggttgatttcataccttggctgttgtgaatagagcagcaataaatatgggggtacagttgtccctttgatttattgatttcctttcctttggacagagagacagtagtgggattgctgggtcagatggtagttctatttttagtttttaaagacactttcatactgttttccatagtcgttgtactaatctacattcccaacaatgcataaagagttcccttttctccacataatcaccagcatgtgttattttttgactttgataataaccattctaactggggtgagatggtatctcattgtggttttgatctgtattttcctgatgatccgtgatgttgagcagtttttcctaaacctgttagccatttgtctttttagaaatgtctattcatgtcctttgctcactttttagtgagattatttgattctttgctgtcgaattgttttgagttctatgtatattctggatattagtcccttgttggatgaatagttagcaattttttctccattgttcatgttatctcttcactctgttgattgtttcctttcctgcgcagaagctttttagtttaatgtcgttccatttgtctatttttgttttggttgcccctgcttttgagatcttagccataaaatctttgcctagatcaatatcttgaagcatttcctctatgttttcttttagtagttttatagtttcaggtcttgtatttaagtctttaatccattttgaattgatttttatacattgtgagagatagaggtctagtttcattcttctgcatgtgaatatccagttttcttagcacaatttattgaaaagaatgtcctttcctcagtgtatgttcctggcaactttgtcaaaaattggctggctgtaaatatgtgaatttatttctggattctctgttctgttccactggtctgtgtatctgtttttataccaatagcatagtgttttggttgctatagctttgtagtatattctgaaatgtgttagtgtgattgccttcagctttgttctttttgctgagtattgctgctatttgggctcttctatggttctatgtgaattctaggattgttttttctattgattcaaagaatgtcattagtatcttgataggaattgcattaaatctatagcttaccttgggtagtatagtcatttttaacaatattaattgttccaattcatgagcataatatgtctttctatttttggtatcctcttcaattttgttcatcagggtgtagtgttttttgttttgttttgttttggctttcatagaaatctttcacctccttggctaaatttatccctgagacttttttgaagttataaatgaggttgctttcttggtttctttttcagatagttggttattggtgtataaaaacacaaccgattttttatattgattttgtgtcttgtaacattactgaatttgtaaaatcatgtcatctgaagtagagacaatttggcttcttccttttttttttttttgaattggaatctctctctgtcatccaggctggagtgctctggtgtgatcttgactcactgcatcctctatttcccaggctcaagtgatcctcccacctcagcctcctgagtagttgggactacaggtgtgtgccaccacacctggctaatttttgtatttttcatagagacagggtttcatcatgttgtctagtctggatttgaactcctgggttcaagcaatctgcccacctcagcctcccgaagtgctgggattacaggcttgagccaccacaactggctggcatcctgttttccagtttggatgcctttcatttctttctctttccggaaagagaaagtctggctaggacttccagtataatgccgaataagagtgcttagagtaggtgtccttgtcttattctagttcttagaggaaaggctttcagttattccccattcagtatgatgttagctgtgggctcgtcatatatggcctttattatgtcaaggtatgttcctgctatacctaatttgttgagagtgttcatcatgaagggcagggtgaaagggattcttttctgaaggaggttgtgtcactcagtgtctgatgaggatatagaagtcagtgtttggtgagagatagtaatttgaagagggaacatttactataaagaattattaactggcaaaatgtgataaactacaaaaggggtaaattgtatgctaaataacacagaaatagcaaacatagggaagagctgctacttctaggactgagggaggatacccaagaaaagaacaaacatggaagggtctttcacacctnaaggctgagattcagaccttgttggagagggtggtgctgtggcccgcaggatagaaaagttctttgaggtgccacaggccaggcctggtgagtagggtactggctgttgggtgccagtggatcagcactgtggtcaaaaaagtgccttctagggtgctggaaaaacccactggaaggtggtcaccattgggtctcctgcatactgctggcaaggaaattgcctgctcgggtgacaataaaactcagtaggaagccctcactaggtgctggtggaactcactgtagggtgactctcccatacaccactggtggcggccacaggtaacaagaaccaggaagaatcaagaaggaatgctcctttatttgctataccttgttttattttattttatttatttatttttttgagacagagttttgccttttttccctggctggagtgcaatgatgcgatcttggctcactgcaacctccacctcccaggttcaagtgattctcctgcctcagcctcccgagtagctgggattacaggtgcgtgctaattttgtattttcagtagagatggggttttaccatgttgtccaggctggtctcaaactcctggcctcaggtgatcctcctgcctctgcctcccaaagggctgtgattacaggcatgagacaccgcatctgacccctttactataccttgtagtgtctcccctacactctaccagcaacagatgacattgcactggctgaccgaggagccagattagtatcgtggaacagggcaaagaagggtggatttggagcggagaggcaatatattgataactgtcttggtgaactcctttggcttcttagcttccacatgcaccattttatatatatatttgaactctgtataacacaaagtcaactctgttcttcagagaaatgcagagttctcacccctttccccaaatgaggagacacacagttccaacagttatcgtagtctcatctggctgtcttaaatactcctcaaatcaaagtcccactgaatattctcttacctaaaggctaaattgtagagtttatattcaacaactttcataaaataatgaagagagaaaaaggaaaatggttaatatatacaaatacacacatatacatcacatgcaaagaggaaatacacaaaactgtcagaattctcagttttgtaattgattgagaggccatagttggtatctatggcttccttcttctactgcctattctgtatttccattgcccttaaatggtcaaggttctttatctggggagtgatccaaactttcatttctcaacagcctgaatcctcaataatcctgccccctccttttgactcctgcggtttcccattaacctttatttcacaccttgagtccaggttccagggagttagctaatattggagatgacgcatctggtcgtaggcaggtgtctggtgagatggctgtttttccctttggtcctggtccttggacctcatacattgctgttgagccattgcttgtttctgtctacatggcatatttacctcaggaggctctttccactatcttcatgtgatacttgagggagctgcatcatcacagtttcttgcttctccaaaacgctggggtggagggggaagggcagtggggtgggggaagagggatccagaatccctgcacggactcctctggctggatgccagatgcagccactctcttccccatctctgtgctccttttctgggtggtggtagggtgaggtgggaaattactttcttgttggtcttggatactttgcaaagacatcagtacattttgttagctttaaaggtttagttcttagcactttgccatcctgggaaatcaatgccagcaaatcccatagaacttgtctgctttttgcttcaatttacccgtccctgaagacaataaacaaagagatggcattctgcttataaaagggtagtatagtaaaaaatgaagaaaatatatctcacaactcatttcccatcttttaataaatagtgatagacttaaaatagctaagattgaaaatgatgcctatttgaaaatttactaagtaattacattctagcagttatacatgagatatttattatatatcacatgtactataaatctaattatctgtggtataaatagacattcctaatcacttccttttaagcattttctcttgaactttcgacatttgaattggattcagaacacggaacaagcacaactcttaaaagtgtcagacatgctagatttctttctcgctcccatggaaaaagtaaacacagcataaaacactcatcaatttttagaagttaagaatgtgctttatgtagtttatcctagaaaaatcctcaagttatataaacttttagattatgaatgagttatggtcatttggagatggcaacagagcaactggcaggttcaagaatttatacacaaaggtgaaaggctttttgaaacaatcagagttttctttcaagtctaacttcctgagtaatttatctgagaaattgtgagatgacatgcaggaggactttcaaaatcatcccagtgtccctcaatcaatctggttcaaatatgcagaattggaggacaggtcaagaaagcagacgctgaaacaggaggaaatgaagtcggcttattgtgaacatgactttttcccatctaaaaaaagatgatagtttacattgttttgagaattgtggagtgggagaagcagaccaacctttcatactgctgaaatataattttcctggccacacatcttcctcattaattgtctccaattccttacaaaagaaaaaaaaaaccttcctacatttttttctattataaaataatttcatagttgtatttaccaaatgtttaagcatgaatgtggtaactggtgaaaacagcttaatctgtggtggcatgaaatgatgaaaaaataaatatattttctcttttttttttctgtttttattctccatccacatcaactgaagggtagctagatggttttgtgcagaagtctgagtgtcccttgtgccaggagatgcttttgttacctagatctgtgcttctggagctacttcactggattgatgtttagggaggactagaaagttgaaggggagaagttgaatcatggaggatgttggagtgctaagatccctgaatgtggtacctgtagataaatacagtgactttgagacgcagagcaaagactccagtggagtctgttattcagtgagcaacagcgtcacccaccatggaataaatcaggttggggtggacaatgtatttcaaggttctgtgattaaagattgtgggacacaccagcggcccttccataaatagatttcacaagcctcagccttcttatgttggtgggtggggtagatggtggccagagaatgactgagattgggttttctgtcaactcgaatgggagaggctccttcagttggaattagatatgtaaaaggtaaagaaatgtgttatttcatgtacctgtggattgtgaaacaaattcatgctcactacatttgtttcaaaagcataaataggccctgccttctgcctttatctactctacacgtatagtatggaacagtatgattaagccagtatgatttgagccagaagattaagttccataaaaagtgaagaaaagtcaacaatttaacacaagaaatgtttaccgactaactattctatgccaggtctgggagtatgaggaaataaatgtgacatatcccttgagaaagcagaaataatccaaagaattcatacatatacaaattattaattacatcagtaaaaatctttatgatgggtgtggccaggtctggggctggaaggcccacctcagcattgcaaaagaattagtcttcagtcctgaagctcacagaatttgctaacctattacttagggggaatatacccctgaatatcattacttgaagaaaaaatacacatttcctttggaagaaagtaaaatcagaaatcttgagggttctctcgaagaaaatcagacctgtagttctaaccagtcaactgaccttagttgagaatgttaatgtgccagagaaacaaatgaatgctcacctttccgaggaagacagtagaaaataacccgcttgactatcttcagctggaaaaaagaactctttttttttttttttctgtgacggagtttcactcttgttgcccagcctggagtgcaatggcacaatctcagctcactgcaacctctgcctcccgggttcaggcaattctcctgcctcagcctcccgagtggctgggattacaggcgtgcaccaccacgcccggctaatttttgcatttttcagtagagacaggctttcaccatgttagtcaggctggtctcgaactcctgacctcagatgatccacccaccgcagcctcccaaaatgctgggattacaggcgtgagccaccgtgcccattcgaaaaaagaactctttaatccactatacctaaccttttactctctcctttagatttaaatgattaacttctgataatgctgcagacatttttttttctgaaagatttgttaatgaatggattccttttgaaagaagtccaggcaagagcacagaaaaacagagagttccaatgatgaccaactgtgaaacatactatgctatataagaatcctctagagatgtaactgtaacaccaagatcaaagcacaggggactgtatcaatgcatttccctgcagaagataggactctataaagtgaagggcaagtagcatgtggaagaggaaggacactgggaagagccctaactgctgacgggagagcctagtccagctctggtccttcactggtcactgtgagatcttaggcaaatcacttgcttttctgggccttcattttctcatctggaactgaggtaatcgaattagacccttctttaagtcctaagattccaaaatctccaatgcaggcacatattaatattgtaccaggtagcctttgtcctacattgaattgtaggtatagtttgtgcatatttgtctcccatccaaaagtctgcagattcactaaggaagtcagttaagggccaatcgggggatttgaaggattcagagctacaggagctattctttattcctgggtaactctaagccagaagatggagaagctcacctaaaagctctgccatcaggtgtgtgggtggtgttgtactatggtgtggagagaggagaatgtctcaggagaccaggtaagggttcctatgattgcagaaccaaccaaagagccttggaggcaccaatgatgatgattttctctagttcttcaaaagccaggaactgggccatattgttttctttgaaagaaaagaaaaataagtgaaaatgcttcacagaatattttatagcaacacacttctctggattaattaatagttttagaagatggaggtaaagagctcatctgtataaaggtctgaagatgcacatatcatcttggaaaaaaagaggctgttattccatcatttccacatacacggttttgttacaaatataattgaaaattcaagtctttcaaaaatagaatacatgggtactggagattaggtcacacataatcaaattctaaatttcttttccagcaaagtcgtccctactgaggtcagagtacaaagaagaggggatggtaggctaaacgccaaatgaatgaaaagggaagatttttcaggcagggagtcattagtcttgtcacatgctgctgatatgaaaggactgaccactggattgagcaacatgaaggcatgtgacctcaatacaagctttttctgtggttggaatgagataaaagagaacagggagagaagtggagtcaccaagtgaggacaactctttgaaggaggtttgtggaccatttgttgttatacagagggaaatgcacaggggattttatgatgagggaacagctctgtttaagaactgggtgtaattgcttttgagtccacagagagtcaaggttctctgtgatttaattattcaggaaagaggcttcctagaaagtttacactttcttcaaagaaagtcagtttctctcatttgcatgtctctcatttctaagtgacttaatgaaaattcctttccccactaacttgagttttatataccttgtatggagtagacataagaagtgctggttggcctgntttggtgcaggacaggatcccacaaaaagaaatttcagccttntaacctttcttcctttgactttctgtgattagtttccttagtgtctggtaacagctctggttcctttgctgtagtgtggtgagcctcatctcttcaaacaaattggttcacaggctgggggatggtgggcgggagggatgaaatcattgttttgcttcaatgtcggttctcccctgagaggtctttcacagcaagggagtctgtatttttagaattagcatgttctgtttcaatgttgtgaacattcattttaaacctactatatttagcagaggtttaattacccaaattgggaaactagttttaaaccgtcaccttctacttggttaatcaaaacagtccctaccaccagcaggggagactggcaatttcagtcatacagccacacctggtgagggcaactgacaaaagcaattccattgcctgagttcagcatcttcagcacccatccagccctgttgtagcccctctttctttcagtaagactttcctgcaatataccctctgtggactagggctggggggatgtgtctgctctgatgtctgtggggagtgtcttttcttcccacacaaaaatcgtgattatattttccaaaatagcactcaggaaacaatctctctgtggcatttacagatatgtgagatgttgaggaactgcggtctgaatgatgaaatttcttggatttttcagcaatgtcattttttccttcatttactcactcacttctggaagggccagtctgagagctgggctgaggagtccaaggctgatgcagtcatggatgagtctgaggcagggagaccactagcaggagaatgggcagtgccaactggctttaaaaatactcagatacaaatatgaattttgcacatccatttagtcatttggcaaatatttattgattggttgtgggataagccatagagcctgacactagtttagtgagagagatacacaggaataggaaaaaaattatcataataaatgcacagctacagagcgagagctctgaaggatcattttatgagtatgcgtaacaggaacctgatgtgattgatcagtgaagcaaattggtgcttgaactgagatccacagtggtgcttcccaaattttatgtgcatatgaatatctggggatcttgttaaatgcagattcctgtgctgcttctggggcttggggaggagcctaaaattctgcatctctaataagctgccatgtgatgctgatgctgctggtaccaaagattctaaaggacaaacataacggaaagcaggggttgggggaaataagtttcacagggagggaacagttatacacagcaagaacatagtctgcatggtgctcttctggtccctaaccactgaagcaaaggtcaagtaattgttctaccttcttccatgactaattggcaggatatatgttcccctgataggacatttcccaactttaaggctgctctttatgtttacttcaaaattccttttacctcttgtaaatattgggatttccatttaaaaggtcagacaaaagatatgtcttctacccttctccttagaatttgccagaaaacagggacagaaatatgaatttcatatttgataaaccttgaagactaactcccaaaagataatatttggagaggctctcaatgcagtgaagatcaaatatgggtgcacaaaggctcctggagggagtgcttgggaacacaggtctcagataaagctggcaggaaactgttttcttaagtagatggcactttgagggcaaaaccaaccaccccttcttcggaatcacaggaaaggcaggtacatggagggtagggttggagcatccctttaccgcatttgacctcacaggaaagtggagcaagcagaactgcagaaaatgtgcagaaatgctgcaatcagtctgtgtcctagtgaggcagggtggaggagagaggctgaattgcctcctgctctgtagctgccaatgcctgttggctggagagaggtaaaaattcaaacaacccgcacatatagtcttgtcatcatgagtttgtccctgaaccagggagaattcttgctagcctggaactgctcatccccttctcaacaagaccctggatcacttccaacatcaggaagaacacacttcatttaaagatgagtaacaaaaaggcaactagcacaggatctatacaaataanttacaagacaaaaggaggaagaggacaggggaacataaagaatcctcaccaataacaagttgccattaagtagaaaattatgacaaaataaatgtctatgaacaatgaatttaatgaaacaatgaagaggctggaagcagagcaattgagagatcaggggaaatactagcaccaccacaggaggaaatgaaacaagaacttctgaaggtcaggaaggaagcagaagagaaaaataaagctaccatggaaatgcaagcatactgtaataaacactaagaagaaacactgctgacatcacagtgaggaataggagggcaacattaagacacataaacaaaagatataagcaaaataaccagaaatgaacaaagttagagtgaactagagagaacatgaaagatacagaaaacaaaagaattgcaacatatgcattatttgtatcttttaagaagaagtctggagatattactcagtaaaactctttagaaataaaataagacttgaatctacaaatggaaagggcatactgtagctcagaaaaaattgatacagaatgatcaacattgagaggtatccaagtaaacatactggccctcaaggccaatgaaaaattttagaatccaggcaaaaataaaaaataagagtgaaaaattaagttggcatgataacaaaatagactatgtagtggaatatcaaaagtaagagaaaggaatcctaacataaatgagagtacaacatttcaacatattaccataaaaagtttaaattgtctaattcacctattgactcaaatttacaaaaaagggaaatcaaattatttgtaatatgtgagatgcatctaaaacaacgaaactcagaaaggataataaagataaaaattaggcaaagacatgcaaagcaaatgcaaaaaaaaaaaagagcagctgtcataactatggttgcattcaaaacaaaaaacatgaaataagacaaaaggggaacttgataataataaaggatgtaactcacaatgcagttcaatatgataaataaattggcatggaaaacatggtgtcaaagctacagaaaataggaataggcagaaatcctttagcagtagaaaactttaacgcttatcttttaactatggagaaatcatatggaaaaaaagcaaggatagttttaatagctttacaacaaactatatactatgaagacagattacactttcctttcaagtattaatggagcagttacaaaaattaactacatatgaagccacaaagaaaactgcaatgcagtcgatcacatagaaatagtacagacattatgtcatgccaacgcaaaacttcaaatgttaaagagagaaaaaaaaataactttacctcctggaaattaaagaacactctctatataatttttcagtctcatagagaaagtcatcgctaaaaatgcagaatatttggaaagcaacacgaattaaaacactatattagagactatgagatcttgttacagcagtacttagaggaaagttcataactttaaatacttgtaacaaataagaattaaatgaattaagcatccaatatcagaatgtattaagtaaaataaagacaaggcagaatagaaattagtaaagataaaaacagaaattaattaatttggaaaatttaaaaaatgccaaaataaagtctatgagttgtgtttgaaaaatttttaagtaaaaatgtgtgctatgctctttttttgaaatgataactttttaattgtggttaaaaatataaacctaaatttgctattttagctatttaaaaatatacaaatcaatggcattaattatatgcaaatgttgtacaatcatcaccagtactgatttctgaactttttcatcaccccagcaactctgtgtcctctaagcagtaactccccattctccctaccccctagcccctggtaaccttcagtctacattttgtgtctatgaagcctattctagatgtttcatataagtggaataatataatatttgtcattttttgtttggcttatttcacttagcatgtatcagaacttcattcctttttatgtatgaataatattctgttgtacataacataccacattctgtttatacaattgattttgttatgtgctcttggatggttctaccttttagctattgtgaataatggtgcaacacccatcttttttttaaagggaaaaagcagaaatagatgatataagaaaacaagaattgagaaataattatagatagagaaaattaaaggagattataggacttatatgtaccataagcaaataaatgtaaaaacctggataaaatatgtaatttctagaaacgataaagttctaaggctggccccagaagagttcgaaaatctaaagagaccaattacaatagaaaaaacaggaaagtcaggctatccgtcttccaaactaccaggcacagatatttttacaggtgagctcttcataaccttaatgactcaatcactctaaagcttttaaaattcttctagaagaaaagactctagttactttttataaagtggaggttacactggtgtcagtatgccacagaacaacaaaaataataaaaagaaagtctaatgtctcttgtgactatcaatacaaacatcttcaatagaatactagcaaacatattccaggaggacagtagaatgtccttcctttcaggaaaggaaggatagtttaatattaggaaatctattgatattgtttaacatcctagtatatgtaaaaaacagtaaaaccatatgcccgcactcatggttgctgaaaatgtttgctataaaattaaaatccattattgattatgaaaaaacacctcatcaaatagaactaaatttatcacattagtaaaatatatttgtcttacctcaaaagccaggtcatgtttaactagcaaaccatacactcacattaaattgggacaaagatgccattaccacaacattattgaacattggtcttgaggtgctaacaaacttttagataagataaagaagagtggtatgtacaagttggaaaggaggaggtaagataatcatatttgcaaataatgtaactctgtgccttgaaaacccaagaaaattaactgaaagatcactgccaacaatagtaaaagaaaaaaaaaataagagaattgagtagtgtggctagaatagtctttacacacataaacaacaattggtgctaagatatgcaagaaaggactgtatgcccagagaagctaattctacagattatatggaaaaatgaaaaaagcaagaatagctaggaaacatcttgaatcagaatagtaatgagaagcatgaatgctctgatgaacacatattatagagttataatcgttacagcactatggtagtggtgcacagatagctacatcaatggaacagaggagaaaattcatttttttttgcagatcacagtaaaaaatagcttgaaaaaccactttcctatgtatgtcatatgtaaattttacataaaaatacatgcacgtatatacttgcatatacatagaacagctttggaagtatattcaagaaatgtaacagttgttgggtgatggggtaggaagtagtgttatgtttcactatattttttgtgtacctttgaattttgcactatttgtggtattatttctttaaaaaggcaatttattttattatttttttcaaacccagcacagaatattaacaaagtagataatacataggatggatatggaatgatttgcttggatcactccaagcaaggcatctgaactattcacatggttgtgtttggaagctcccagggtctaaacactgtaagatttcggagatttataccagatcagactcacaaacatttgattttcctcatttttcaagattttttcccctctggcctttcatttattcatttagtcttcagtagagagaccaggggatggcttggatttaggggcttaaccacctccatcttcatcagctccattcagctgaagctgttgctgttcttctgaaaagatcccaggagcttcccaatacatatgcaatctctgtaaaagcagtgtgtttgcaaacacagctgcaagaaaagcctcctacagcaagtatataaaaaggtgctcaatatcactaatcaggcagatgcaaatcaaaaccacagtattacctcacacctgtgagaatgactattataaaaaacacaagagataacaagtgttagccagaatatgcataaaagggaaccttgtatactgttggtgggaatacagaggccattgtggaaaataatatggaggttctacaaaaaattaaaaataaaattcttatatgagccagcaatcctgtttcttagtgtagatccaaagaaaatgaaatcacctcatagagatatctgtgcccccatgtttcaaagcattattcacaatagccaagatatggaaacaacctttggctgtcaatagatgaatggataaagaaattgtgtgtgtgtgtgtgtgtgtgtgtgtgtgtgtacacacatacacaatggaatattattcagtcttaaaaaaggacatcctgccatttgtgtcaacatgaatggaccaagaggaaaattataatatgtgaaataagccagacacagaaagaaaaatactacatggtctcacttatatgcgaaattaaaaaaaaaaagaaacaaaattcaaagatgtagaaacagagtaaaaaggtggttaccaggggtaggaaaagtgggggagtggggagatggaggtcaaagggtataaagtttcatttatgtagaataaataagcctagagatctaatgtatagcatgaagactgtagttaataatattttatttcataagggaatttgctaacagagtggattttaggtaattctactacacacacacacacgcacacagaaaaggtaactgtgtaacatgatagatatgctaatttgcttgatgtggtaatcatgtcattatgcatattgttaaataaaatttatggaagctctcattctagatcccaacaaaccaaagcaaaatggagtcccacacgctaagtgccacatgattaaactgaaattttaagaaagcaggtaaatttccaaacagaccagatatttttgaaaacagaagattcacagaaaccaattagaaagggcccagtcagcctaagtcagtataataaggaaatctccacagttttaacccttataagaaaagtaacctgaagtaatctgatgttaaccgatctgcctttttctattattctgtttccttgttcccactttacaaaaaccaattgttctgccatgcccagtggagcattcattctatttatagaatacaatactgctgaattctagaatcacaaatagaagccaattagatcttaaaactaaatttgttatagttttgccttttgacaatatgtatatcaaaacatcgtgttaggtattgtcttagtctgttttctgttgctataacagaataccacaaacggcaatttatacagaaagaagtttatttggcttacagttctggaggctgggaagtccgagagcatggtgccaccatctggtgagggtccttcatagtgaaagggtggaaggtggaagtgaacactagaaacagagagcaaatggaggctgaacttatccttttatcaggaacccactcatggggctctgccctcgtgatctaatcacctcttaaagggcccacctcccaataccattacattagcaattaaatttccacatgagttttgaagggggcattcaaatcatatcaagaaaaaaaaaagtcaagtcccctaggcttctcttctaggtagattcctgcttcagtcccttcctatatagaaactctggagtttcccctacctcatactattgcctgttttccatggctccaagagaaaaggaatattctcttttcttctgaaaaagcactacagtttattggtcagcaccaagtgtgtttaacttcagtttcagatggcaactcacacatagatgtgtttatgttgccctttatcagtattatcattggcaaagcctttggtaagcaacagaagtggctaaacagaataattccaggcttgaagttcctttttcatctggttccctctgggaaaaggctatgaaagctaagggtggtggccaagtcccaaaggccaaggtcaccatcaaacattttctgagaatctaccaaaaacacaggtctgtattaggtcaatatgcacacagttgtgctgggaaggaatgaagctttcaaatatgagaactgtacctgaaaaatctttgccatcagttctttgaaatgaaactctaagctgggaagaactctctgcttaggggaagtaggactaaaacttgacttttgatttggagaacattcaaaagactctaagctcatgagtgctcaacttgtaattttttgcccttgaaaaaactataggcgggtgcagttacacctgtaatcccagcactttgggaggccaaggtgggtggatcacttgagcccaggaattcaagatcagcctgggcaacatggcgaaaccccgtctccactaaaaatacaaaaattagccaggtgtggtgatgcattcctgcatgccagctactcgggaggctcaggtgaggggattgattgaggctgggagattgaggctacagtgatccgtgatggcaccactgtactccaacctggacaacacaaagaccctatctcagaaacaacaacaacaacaaagaagcaacaaaagggaatttgtacttttagccatagagccttcaagtttgttataaccactggggagaaaacccttcatttctacttcattcctaaaatgggttaatcactgattatacatagaaaatttactcaaatgaaaacaaaccaccaccagattttacctttaaatatattttcttggtattattttaggttctggtagcaaaaggtgcagagataaggacatgggttaatgacatgggttatttattgcactctgcatacagcagcaagaatgcttttcctaaaaattctttttgctgaagtcccttttttgcttatgtctcttttcctaaaaaatctttttgcttaagtccctttgttgctgcccacatcatttgatttcccacagcaaattattataagcctgcattatcctgtttctcctcctcctctgaatcttcctctccatcagcacgatttctgttttctttctttgccaactagctgtgtggctaagagtaagtcactggagtctcactgtccctttgtctgtaaaactatggttttggaataagaagggtcctggcctgctatggggtgtatcagagtcagggtgaaagggtcttaaggtatttgaaaataaagcagcagataagcttgacatggagagtagcctacctctggctctgttttctccatttccttaggagtgaaaagctggccgtcagcaagcagattcagtgctcacattgtagccacataatcaaaggaagaaatacatatctttttttttttgagatggagtctcacactgtcacccaggctggagtgcaatggcacaatctcggcttattgcaagctccgcctcctgggttcatgctattctcctgcctcagcctcccgagtagccaggactacaggcgcctgcccccactccgggctaattttttttttttttttttgtatttttactagaggcggggtttcaccgtgttagccaggatggtctcaatctcctgacctcgtgatctgcccgcctcagcctcccaaagtgctgggattacaggcgtgagccaccatgcctggctgaaatacgtatcttttaagatctaaagaaaatcgttttaaagttactgttgtgtccatcttgttttcttgttactgaacttatttcaaaaatttaaataacattaaaggaaggtataagatttttatggctatccaaaagctgcattaaaaaaaaagtaacttaaggatttccaagtcaatttccggctgtgaaaatcacactgtgtcctgagttggtgggttcttggtcttactgatttcaagaatgaagccgcagaccctctcagtgaatgttacagttcttaaagccagcgtgtctggagtttgttccttctgatgtttggatgtgttcggagtttctttcttctggtgggttcacggtctcgctggctcaggaatgaagctgcaaaccttcgcagtgagtgttacagctcttaaggccacatgtcgggagttgttcgttcctcccggcgggttcgcggttttgctagcttcaggggtgaagctgcagaccttcatngtgagtgttacagctcataaaggcagtgtggacccaaagagtgagcaacaacaagatttattgcaaagagtgaaagaacaaagctaccacagcatgaaagggaacctcagcaggttcccactgctggcttgggcagcctgcttttattctcttatctggccccacccacgtcctgctgattggtccattttaaagagagccgattggtctgttttacagagagctgattggtctgttttgacagggtgctgattggtgcgtttacaatccccgagctagacacaaaagttctctacctccccaccagattagctagataacagcatccattggtgtatttacaaaccctgagctagacacagagtgctgattggtatgtttacaaaccttgagctagatacagagtgctgattggtgtatttacaatcccttagctagacataaagattctccaagtacccaccagactcaggagcccagctggcttcacccagtggatcccgcacgggggccgcaggtggagctgcctgccagtcctgcgctgtgtgcccgcacacctcagcctttgggcggtcgatgggactgggcgccatgtagcagggagtggcgctcctcgtggaggctccggcgcgcaggagcccatggcaggggcgggcgggcgggggtgggaggaggggaggctcaggcatggcaggctgcaggtcccgagccctgccctgcggggaggcagctaaggcctggtgagaaattgagcacagcagctgctggcccaggtgctaaacccctcacttcctgggccttgtgggcagagcctgctgagcccacgcccacccagaactcatgcccagcccagaactcgggcccacccagaacaagcgccgtgcccagccctggttcccgccagcgcctctccctccacacctccctgcaagctgagggagctggctccgaccttggccagcccagaaaggggctcccacagtgcagtggcgggctgaagggctcctcaagcacggccagagtgggcgccaaggccgaggaggcaccgagagtgagcgagggctgcaagggctgccagcacgctgtcacctctcaatacgatctgtgaacatgtgccctttctcagttcagaaagccatttagagcaaatgtacttatttactttatccaggctctgcttactcctctcctctccacagccatctcctccattagaaatgcttttccctgccatttttgacagaccctgagcctcctggcctccctgcctgagacgcattatagtctctctgacctggaccactgcatgcagcttgggagcctccctgtctttaaggtatcggacaaaatatagatgagagtagcaaggcattaggagtagtagtaatagcagtacaaacaagaataataatttttatgataatagtagctaacatttgttgaactccttttatgtgccaagcattttatgtttattatcttaccacccttgacaaggaccttatgaggtgggtactatcaacccagtttctcagaaggggaaactgaggcttataaagaatatacaacttgctccaagtggtaactagtggagagaggatttaaaccttggctcttcaacatcccataacctatgcatttagttgctgttcataaatagtcacctgcatatgttcatcttgcttttacctgtgttcatcccatcttttttgtgaaactcctggaaggcaggtcgtgtcttctttcattcttttataccatctcagagggctgtaacaatacatgctcagaaaacatttctgttcaacctgcatgaagtacaaggcaggctgaaatgtaaagaaatacataaattacactgaggaagagcaaatcctttcatataactttttcctggcattacctcttaggggaaaagaattctcaagcaagctgtaactgagctggttaccaaaatcagaatgaattctccccaatcacgggggacattccataagcctttggagtgaggtctattttaaggattttgttcaagttcctccttcttgtttcctggccacactgcccagcacttcaattggctaatagggattctgaataagaaagatacaggcagctcacttggaagttacgttaaggactaataaagatcttggagtgattttcaacaagataagatcagcatcctggtattgagttattttgctacattaattaatttcagtttgttctaatggtctttggcctcctgcttaaatgtcaattgaggcaacagattaattccccttaaatagtggcctgtcatgtcttgttacttagttctgggttttataaagtaagaactaagatggatatttatcaatcgagcagatttctgtgttgtgtcctctaaagcccttggggtcagtgtctcactgtagcatcactaacaccttttatggaatcaagtgattaataaatgtgtcctcatgagactgtgatgcttctgggtgttcattttagataccttaataattagtctcaagagtagctcagttattaagtgattttggggttgcatcatgtcagggaaacaatcaagaagaaactattttaatagcataaatttctctgagatagtgaagataaaagaatgctaccagtttacccactccttactgtctgagtcaggaagaaggtggaacatcctattccttcttcacctctattacctcatttagaaaattttgactatttcttcttttagctccctttttacggtccaccatttttggaagatgactttctccctgtcttcttagaataaaaggtccaaaggaagaaaagaacaagatatgctcaggagttacctgtgatgacttcctctcccttgcctcgggcactggcccaccactcctttttctattctcagttctttatctatttacttttctattccctgctcctttcctattgtcctgacttgcatgacactggcaagctacaaaatgggaacaatagcaactgccttagaaggctgacaggattcacgggaagcaccctgagcagagtctaattcctaatgagtggtccttacatattaggatcattttctttccttttgagcttctggtttcttggcctctggccttagcctctttcaacatattctacataggtaatcagattcaccttcaaacaatgctgttttgatcttgtcatctggtgaagaaaaaataaaaccttcagtggctttctaagacgatgaaatcaaattcaaagtctcatcgtggtattcaaggtcttctgtaatctcccctcagcctgtggctcttactgatgccccattcttctattgctcagggtgctttgggctgtagccactaggttgacgagcatcctcttgacgagcatcctgatgatgctgataaaagtgctcaaggacattttgggaattttttctttagtgttatctaggatagtactgtatacaatgcatatttttatgtataaatcttatttctgtctatgttagttgccttgaaacaaaaactgggcctttgtatctgtgcaggctacaaaggcttgacactgctacccttagaaaggcctgcttgccaggttagcctttggttggtaactgggaactgagcccttggagggctctcagtcaacagtcaattgataagtgtggttcactgtgcctagacttttgtgcaaacaacacagtttatgcttgaacacctgctcccctgtttggagtctggaatattttgatgtgctaggcagagggtgcctatgtgatcagctccatgaaaaaccttgggcaccgagtttctaaaaagaagcttctgtgggctgaaacgtcatatacaagttgctacattttccttgctgtactctatgtgatctcccgtggtaggcagaagcataaggaaatctgcacgtaaaatcattcagacnctgcctgtggctctcccttatgatctggctgtgtatccttattacatcactagaataaatcttagctttaagtactgccatacactgagtcccatgggtccttctagtgatgtccaaatgtagggggcaggggtcttgggtacccctgacacagtatctctttcaaaacaaattcttagagtaggttcttaataaatattttgtgattgagcatctcaaatctcccaaacattgtagatgcttaaaacatttaaacacttttgtttctttttaccatttttgattttttgggcacctttaagtttttttttatatgccatcaggccaacatttataacatatggtagatctgagatgttgttttactgcctacaaagaattgttctagttttgcctatttattttcttttacttcccgatatttcagacactgttagatcttgccagagcagttcttttgggcttttgtgatacagaatcactggaaaaggtagagggttagaagggcacaggtttgaggactaggtctgggagatcagttttggtgggagggtatgaaggagagaggcgcatgacagggcttgtgtgatgtgacgtgaccacatgaaaggaaggggctttgtgaattgttgcggcagactgagattccttttcacagcatttgagaaataacagaaagagaatttgttattttgaaatgacttcctggcggctgagttgttttcatttgataacgacccctctctaataccaagtcatggtttgcagtttacgtcttagggttttcacagattttatttgatggtaggaaccacatcatttgttctagatttagcatgtgaaattcccagtaaattcttggtgacaatgactgattgcttcattcataaacatttattgaatacttgctgtgtgccaagcatcgtgtgtagaggatacagagatgagcaaaaataggtccctactcacatcatagaggggaggccgactcacatgcacacatttccaatcagatatggtgaatactagtggtggaaggttaggagcccagaggacagcatctcatccactgggaccttgcttcctacgaggcttgtcctgcatttcatggccttaaatttcaccaatgtagttatctagtggtgctgataaatcacttataattagttttttattgtctaagtatcaattttagctgctgtttttttaacctttctttagtttctgcctacataatttccttagaattaaagcatcaataatggacctttgcaaaaataagcactttctaacaccaatgtgccatccatcagcaaaggaggccattagcaaagtccaattcatagactgcctctgattttgcattttaaacttgctaatatttagctcacagtgtgattttcccacggtcacacacctagttggtggtgaattgccgtaattttgcaattcatattattttgcatgtatctcattttatttgtattctgtgccaatctctctgatattgaatgtaagtttattgagtgcagatgtctgtgtttttatttttgtgtccctagtgcccaacatatngtctagggaggaaaatacttgttagataaacaattagatgatctattaggattctgtagagaaacaaaaccaataggaaatatatagatacataagaggagatatattgtggaaattggctcatgcaattatggaggttgaaaagtctcacaatatgtcatcttgaagctggagaaccaggaaagccagtggtataattcagtctgagtccaaaggtctgagaaccaggggagccaatggcataacttccagtctgatgccaaaaggcctgagaaacttcaggggagaatctgaagtcccaagaactagnaactccaatgtcagagcaggagaagatggatgtcccagctcaaggaaagagagttcaccttcttctgccttattgttgtatctaaactgtcaataaattggatgatgctggctcacatttgtgagggcagattttctttatttagtctactgattcaaatgctaatttcccccagaaacaccctgagagacacatccagaaataatattttaccagctatctgagcatccctaagcccaaccaagttgacacataaaattaataatcactgatgatagtaatgaaaagaaaaaacttggatttctgctttttggtcttcatgagatattttcctcactgtatctctcttcatgagatattttncactatatcacatggatatattttccacttcgatatagtagaaaatatgcatggaaaaatgcatctattatttattgagcacatattatacttgaggcactctgctaggcactgtattgaacaaagatgattaagacagtgtacctttcctaaggcacagaaaccataagataaatatacaaatgactgtagtgcaaggtagaatatacaaatgcacaactaagcaaatctgagaatggggctttcacacattgtgggagaatgagagaaagcttcatggaggaggtaacttttgacctaaaccttggagcaggagcacctgagttccagaggttaattaaaaaaatgaaggcagagggagagagggcagggtgggcaaagggaaaaacaggaaatataaatgtgagtcatttttggaaaactgtgggaagtctcttttaggtgtggtgtatgaagtgtgtgtatgttgggggaatagagcaaagtaaggattaaaagtcaggtttccaggctatgttgcctggccaagctcagggctttgcacttggttcatcagcattgatatgttttttgttttgttttgtttttttgacagcgtctcgctccgtcaccagtctggagtgcagtagtgcaatctcggctcactgcaacctctgcctccgggttcaagcaattctcctgcctcagcctgccaagtagctgggactacaggtgtgtgccaccccgcccagctaatttttgtatttttagtagaggctgggcttcaccacgttggccaggatggtctcgatctcttgaccttgtgatccgcccgcctcggcctcccaaagtgctgggattacaggcgtgagccaccgctcccggcagcacttatgggttttaaatatgagagtgacaacatcaggttattgggcagcaggaggtgggccagttttgaaaggcaggtgaatgaggcagtgagataagttgggaggggctgcaatagttcagaaacaaggtagtgtgcaagtaaatcacaggtggcaccagagatgaagaggaagaggcagtgtgacagctctgttgcatgacacaacatgggaaacgcaggattgagaagagccagaggtgatgatgccattagcagcgtgcatttagtacttatcacaacctatttacattttctatataaacattgatctcattagactgtgatctcctagaggaacaagtcccatgtcattctcattgacaaaatgaacatggcagatacttggtaaatgtttgctagtaagtgaatggaagtcaggcgagttggcttggtgatggcagctggggtgttgatggaaataccgtgcttctttttggacatgatggaatttggggatgtggtctatttgttagatgcagtttctaggaagagattacccaaagaactgaagaacaatgacaaacttatgtgtatgtgagggcaagataaagagtagagagatggtatagttgggtatggagagaatgctgtaactgaactgctcccttcaagatgtcaggtaagattggagagaaaatgcaggatagcatttgtcacaggtagttggaatgtggagggaagactggaaggatgagaaggactgaggtggacctgtgggctgtgttagccggtgaaagttggagggaaagggaaatgggaggcagtagagcatggagttacatatgcaggcactggagtcaggctgttggagttcaaaggctagctcttctgtggatttgttatgtgactttacacgctctctcttgcctcaagttcctcttctgcaaaatgaggttaataataatacctgcataaacacatgcacagcacacagaacagaagctggaatgtgataagcacttcataagcattaattcttcttactgaaactcactagggtcactttgtgcatattatcctatttaatccttagtaactgtataggtaggtgttattatcttcattctgcaaatgagaaaactgaagtgcaaagaagtttcataattttcctcaatccacacagccactatatgatgtgataaagcttacctaagctagagtcttacctgatccatctggtgcccgggctagtgcactttctcctataacactcagcctaagctaggtagatatggcaagaccactggctgaggcaactcagatgtgatcaataggtagtagggaactgtggctgacttgggggcaggggaagcagcatgctggaaagattcatctggtatgtttatagaagagagcaggcagcaggcatggggggctgatgattcagaccagaaatggctgaggaaatggtgaggtctggcaaatgtcagaggagctgtgatagaagaatgagcagaatttatgactgatgcaaataaggtagatatgatggtacgtgacagaaactgactaagaagtctgtatgcagtgggtgcagcttagagtttcaacttgaaagtttcaaacctgggactctaagaaaatagtctgaatggtaatgagaaagttgtcactttagtatctgcttcccttgaagaaaagcacctttagaggaaccaacttggagaatagtgtcgcatcaaagtgggacacttcattatttttagtggcagcatggttctgatgagcacaccgtcggtaacctttacttcactgtcagtccagctctgtcaatcctcctttattaaggaaggaagctgatggatctttcctttctttctttctttctttcttccctggagtaggatgttttctgtacacagttagcatgtgaacttctttttaaaaagaagtttacattttactctaattctcatccataacggagtgtggtgatttgcatttgggcagttaggaaaatcagttctgttgacttcctgttttctatttctggcctcgagcagaacttcccatttgagtgggaccaagaagagcatacaaagctgaaatgttctccagaagttgatttccaatggggataaagtaagttaatggtctgaggtgtttgtctccccttgcccccgaagcttgccctttagttgctcttgtttttaaactacagggaatgaactgagggaagcattttttttttttttttcctgcaggtcagagtcccaaagctttagtgcagggttccaaggactcaggagttcaaaacatgctgcttaggctgagctcttggccagatttggagattccaatgtcttctccctttgacagttcctaagaatattttatttggatccttttctttaggtttttctgtctaaacattttattttacctagtgtgaaggggtgagggagggcagattgtttcctttcttcctcctctccccttccccctcccctctcccttattctctgtttataatttaaaaggatgctcactttcattttctcatttgcttccttcacagcaccctgtgaagctgatattgttatccccctttgacagaaggggaaactgcagtttcagtgaatttcagtgacttagtcaagtcactcagttaacagtgctgagagtgaagccctagtgttctgcctttagatctctttttcccagtaccatactgcttttctggtggaggttgtagtatataggatgatgtcagaaaggagaggctgggaagcctgaaacgatcacatcgacaattgaattgtctgttttttctaataaaatagaaaatgttaactaaatatattgccatgcaattcttcaagcatataggactttgggtccttttttgtgtctcagactttaagatgatgtctcctggggagtcatttactatatgcaaggagaatagctgaaaagtcagggtaggccagcagtatttcatgctttgtacttgggcaatatgggtttttctgttggaggttcagcagaggatggtagcaaagtgacatttaattctcctgcttgccaaatcttggtgaggccaaagtgggtgggggaatcggttgtgagtaggtgttaatgacgagtgtctggaccttgacgtcttctcagtcctggagtagggaaaaaggaacagaattagtgctgtttagaagaagctggtgatggaggtctgcttaggaatgagtgcagattaggacaggggcagtgagggaggcccacagagactctggctgcctgtctttcctggcatgtctgtggaatgaccttgctctgccaggactctgggaggaagcctttgattttgggggaatctttaggactatgcacataaccagactttcctgatgggaatctccaagggggcctcctgggccagggccgtgggccagcaggtgtcttcctaacatggtctgtgaatagtgcccaacctaggcggtgccttcttttcctgaatcaagccctttcctcctcagtgccaaagcagaagtggctgggtgggtgaagatctgagtgctggcccggggccacaagccatgggccactacccatattgctgtgagatcctgacctttctcttttctggactcacaagataaagagagtgaatgaggaggaaaatcaaatattgtggcagggaggggctgacaaacacaggcatggccaacagaagtctcccaccaaagtgaggagctgagagaaggatttggggagggaatgtcagaagtctcactcccaggcaaaggattcaacaaaggaaaatccgactctggcttgaatatggtccaggtgtggggttagtagtccatgttactgtctgacatgggagagcattccactgtgatggaaatggggtgggttggggtacaggaggaaccatagaggtagaagagaaaggaggtgagaaggaacatagtctggcagttgaccagagtgtatctggctgtatggtgtagtccccataacagggcacctatgtctgtacattgcacaaaaacaaccatccagtgtgttcttaaaagtcctgtgaaggtacattgtaatttgaactatattttgaagatatcagaggatcctatcatttagaagaatctcatgggaattactttttaaaaagaaaataatcattttagggaatagaaagtctctcaacgattggttttgaatctctgggttttaaatccatttactccaagtaggattcagtatttcactctttcactggcagtggattgttttttctcctacatatatggcttgaaagctcttaacaaaggatagtaattaattatttcccagctatttttacctttgacgtattaaaagttggaggaaactatttcatttaacagaatttaaacaaaatgaaaaagttattttccttaaggtattctgctgtgctttttcaaggaaaagcctcctccaaaggcacttttggagacagttaccaaaggaaaatcccacccaccaacagagacactcagcctctaagtttggcttttggaaaatgaacactattcttttttttccaaacaggacgctgtgagatcagtcatgtacactatgaaaataattggtgtgcattagtacaccttgtgccagatttcatgcttgttgaaaggtgattggattcaaaccagcacatttaaaggtcaactggttgttcttaaactgtgcagaattttaactctttcattataatggattttaaccaaatggccattttaggaaggagagagactgcatactgtgttttaactttctgacctttttgttcttaaattttttgtaaagttctcagggatttcctatggatggaaagggtctgagaaatcagttctcagctggcatttggaaaagggtggaagtagaaactgagttctttttaaactgctaaatttaggtcagggctttaatacgactgtgcacatcacataagcaatgtctaaatgtcaggctgaatgttctctctcttttaaataagtacttcaagttcgttagtaatagctagccctctgtctctttcttgcttctcctctcacctttgagcaactttttaagttcctttaacagctctgtggagaaaccaccatgtaatgatcaatatttaacccagntggttgacgttagccccgtttctggaatgggtatttcactgggctttggggttttgatgacgttttctccccagtgactgtggatgcatggattaaatttgttggtctgcaaaataccatctgtctaccagccattttgctgtatttcccaaaataaggtaggagactgatgtgtctcaaataagcagggtgaaatttagtcatctgatgatagtttcttgggttgtgcattagtgtcctgatgagcccctagcaactttcaacattatgaagactagtttggaagcctcaaaggcagtatctttcttgaagaaaaaaaaataacaccaggcatttccacaaataccatacacaagtggtcaggtaaaggctgtgggagttcacgcatctgtttaccttgagtgtgtgtatgaactcttgtagttctaactaaaggcaaatggaaactgtatagagtcccattttgtcaagctgacaattcagtatcctcttctttcctggttgctttatagcccactcttagttgttntctttctatatttcctacaatttttagctgtgaggctgtgtattcgttgcttaaaaattctgtgcctcatctgcttcacttgcaaaatggggaaaatgtcacaggatccttggggtgttgctttgccagccagaaacctttgtggctaatggtgcctttgcctgagttttgctcgggcccactgggctggttctgcccactcagcctgggcaggctgtgctgggctcacgctactggcccagatcttatgcctgccaagggtgagccaggcacaaaaaggcaaggggtatgtgaacaagggagctgcccattgtgcacagccagtcatgccagctgnagcagggcaggcagctccagatgccgacacaagtgctagctccctgtgaggctgtggctggaccaggtgtaccacagatggcttccactgctggcacccgggaatgtggtggtgcctggaagcttggagacgccaggaactacagagccccaaagagggtgtcacatccctggcttggggagctcccaggtctgggctccctgaagggctgcagttcctctcttcttctctcttctctccctcttctcacctgcaacatggcaagcaaggggtgtgtttcagccctgtttgtgttacagctctttcagtcccaccatttagtgggtcccaagttcttgtcctgtgtcctggaagaatgaggtacagggacaactggagggtgagcaaggcagagaggaactttattgagcgacggtacagctcccaggagacctgaagtgggtagctcctctctgcaggcaggttgtcctgtcaagcctgcagctctcaagagagaggagacccacagtgggtagctcctctctgcaggcaggtcatcccttcaaatgtgcagctctcaggagagagaagacctacagtgggtagctcctctctgcaggccagttgttccaacctctgcccagtctggctgagtccagggagttttatgggcttcagagaaggggaagtgagtgctaattggtctatggacagctgtgggcagcgtaagttctcactccagtctgtggaactagcagcctggcccccaggcttcaggccatcccaggcctaacggtggggcttcacggaaactgcccctttctgtccaggagtccgtctgcctcccgctgccatcaacctgctgcactggcacccaggctgttcatgccaaggggcacctgcagcccatactgagccactctcagctcccccttggcccccctcccatgctccttggtgcacagagtctggagggggccgaggcaacagggggctggtgtgtcagtggtactctgagcacgggcatacacagctgggtcgtgacagtgccccagcttgcacttaactttgctctgaaattggagtgggagctaggagtggggagaggctgggcagtgggagcaggcatttctgagcctgtgggggtaggggggtttcctgggcttctgagagtacagggatgcctgggtctgcacccacagctgggtggctgcagctgtgcccaggagggcaggactcccacccctcacactcagaagtgggtggggcttctgcctgttcccagctcccaacagctccatggaatgtgcagccctggctgcgccttgcctgctgcagctggcgtcttctcagcagccactccagatgggccaccactgtcatcaattacattacctaccttagtgttattgtgaaaattaaatgagttaatccatgtaaaatgctgggaacaatgtctggcataacatagaagctcaataaatattaattctcattattgttggtatcatttttgctataatttgaatcttttacatattgttgtgacatatggaggtttttgacctacagggtttcttctgagtggcatagctcagggtaaagtggctctcctcacctctcaataccctactgtcttttgcctaaattccagttaaggatggctagagacatcatatgggaaagggtggtcctgaaccagagagatgggagagcaaattgctaaggtggttcttgagggtagggatggagagccagacagagacaggtgtcctccagacagctgtcctttatcattcactcactgcctctgcagctcctgctgcctccttcagaaagcgaatgtatgttgcctctaatgcccttcctgagctaaagcccagtagttctcaaacatcctctttcaaagacactgagccctggtaaccttcattacattgttgttctcatatttttctcaagttaactcactcataacctacagtttcttattacattgatatattgattatgaatctttcaccattaacttttgttcatttctattccatcgcaaacttaatattcacaaaacaggcttaatctgagcacaagtgaaatggtatagctgcgaaatacctggcagtggtaggtactaggtgttataacatgatgacacttagaatttatagacacttagagcatagtttttcaaatattttggctgtaatcaataagagatagatttcacatcacagtctatacagatgtacatttatttatatgtatgtatgtaggcatagcttaagcaaaagtgtcatgaaacaatgttcaacctattgcacacaatgtactttcatgatttgtattctcttcttttttattgaaaatgagtctggtttgtaacccagtaaacacataacctacagtttgaaaaaccctgatctagaggaacatccagtgggtgcctcttgagttcttacgcactatccacatatcatccgtatcatacataatgggttgtggccatctcagttttattttgaggcactgcctcttctcatcctgacagaaaaaaaaaaaaaaaaaagaaaaagaaaaggaaagaaagctcagatcaagaactaacaccttatcttaaaacatataatctctcctttaccttatgctctttcctaataactattctttttcgattgtccaaaagaaaccactctaataacttataacaccatgtattagaaatttagaaaccatttttgaaagacagtaaagatgtaaattaatggggggactaaattatgcatggatagaaagactatttattataatgacatcagttctcccataaaatcaatgatatttcaataaaagggtcaacagtctttattttataatggagactcacaatcttattccaaaatttatatggaaatgcaagtagccaagaagaggcaatatagccctaaagtaaaagaacacggaggaaaaacttaaaactatctgatatcaatacttactataaagtacaatacttaagtgtggtactgacacaaagaaaaatggttcactgcagtgatcatatacatcttttgttagatgtatttgtatgtatttgatatttttgatgctgttgcaaattttattgttttgtaatttttaccctgttgcaagtatcagaaatacagttgatttttctatccagcaaacttgctaaactttgtggttaatggaaacacttcagctatagattcttttcaataacacaatcacattgtctaagaatatttttattttgcttattctttttcaatcctatgccttttcttgttttcccccccttgctttattgctttggctgagatttccagtgtcaaatagaaatgttgatggtaagcatttttttctcattcctgatttcagaagaaaagcttgtagcatttcaatattgagttattttttttgtggtgttaacaattttttttgtaaacaccttttattacatttaaagagttttcttctgtttctagtttgctaagagttttcttgttagacgttaaattttatcaaatggcatttctgaatctgttgatataatagaaatttctccctcattctgttaatctggttaactatattaaattgatattttgaatgttaaaccaactgtattagtctccaaccttgtagtaactaaactgaatttagttacactgtgtttcattactggattcaggtggttaacatttaagattttgcactgtcacatgtaagagagttctggcttgacttttcttttcttttaataactttgttgggttttggtgtaaaggatatgctgacttcataatacaagttgggagtggttcctgtttttctcttctctgtagagtttatgtaagattactgttaattcttccttatctgtttggcagaattcaacagtgaatcgtccatttcatataaacaagtttatttgcttaaggttactcagaatataattttaatatatctgaaggatcttcagttaatgtccctttttcatttcagatattggatatttgtaccttttgttatttcctcctttatcagtcagtctcactaggggcttatcagttttattagtcatttcaaagaaccatctgttggctttttattgatattctttattgtatgtttttaaaattttcattgatttctattcttatattatcatttcatttcttctttttctttggacttaatttgctgttcttatataattataattatataatttattgaaatatatgttaagataattgatttttaggctttattctcacttaatatttacatttaagactatacatctccctcaaaggctggatttagctatatggcacaaattttctactgtaggattttcacttttattcagttcaaaatgttttccaatatctgttttgatttcttctttgagctacatgttctttataaatatattacctaatttctaaatatatggggattttccagttgtctttttgttattgatatctagtttaattccactttggtcactttaagagaatttgaattctgccattactagggctgtgttctatatatgttgaagttttaaaatcatgttgttcccattttctctataactggtgactattttcccacttattagtctgttacaagaggtgtgttaaaatgtcttatgatttgtgggattatcagtttttgtaattctgttcatttttgctttaaataatttaagcctctgttattaggagcatatacttttaaaattattatatcttcctagtaaattcagccatgtatttcctcctctttatctattaatgttttgtcttaaaatctactttgtatggtgtgaacatggctacttcagctttattctggggtagtgcctgcatagcgacctctttctattcttttcaccttcaatcttatatatttaagaaatgtctcttgtaagaaacatatagctttgtttaatacagcctggcaaatttcgtcttttgaataaaatcttaatgtttgtgatttatgtaattattatatttgtgttttgtttaaatctatcattattatttgctctccatttgtctcatcttttgtttccccttttttaaaatcttttttactttctttgtcttgaggtttagaaaatttattattattttccacttttcctgctctgttgacttccaccactcccaacttatacacttctgtttatgtgttttcatttggcatcaatattaaccccctcaggacattattatcaaagacagtcaatatctatttagatatacccacatagttagccccctttttgactcctcgttttttctgtatctcagtttcccagctgcgatcatttctgtctgcctgaagagtacctgcagtgcttccttgagtacgtgaaagctgctgaggaatctctcagcttttatttttctgaaaatgtctttattttagctttgtttctgaaatacattttcacttggtatagaattctaggttgaatttccttttccttaggcatttgaagatgtttcattgttttctgcttccattgccatccaaagtcttctaaaacttccctaggtaggtaggtagaaatatttaactcaaaggatgaataaaaatgtatccacaaacccatacttctttttttaatgggatttaaagtttatagatatttagtataaagtatttttacatctgcagattgaatgcagatgatcaaaggaatcaagtatttgatgattcaaaatagagacctttgttttacatatagactaagggttggtccaggactatcaaaacaattctaggaagtatttttctaactcttgaagagagagagagggagcataaaatgtacataaacctaagttaaaagaagtatgtaaaagtatgttaaaaataatgcaaaaagcatatatgcatatattttgcttgaacttgatttccactgacttggagtagttcattctctaagaatctcatgtcatattattttatatctttctcatttgtgaagtcattcaagagatcctgccttgtatgtgttttccagataatttacacttttatttttacatagatgttgattagctgtgtttcattgaatattctcagttttgggtatcagttttcagcaaaacaactaaatgtgacaccttcctactgagcatattgggtctatacgtgtgcatttgacttacgacttatattttcacctaaaaaatattttggatacaatattaaattcttttagcattaatagagtgcttgaaatatgaacttagtgcttttacttttaaaatattttaaaattttgatatttaaaaatttgatattttaaaatattttttctgtactaaaatgcactacaatataatgtgacaattatgaatatggattttagattaagacaaacctgggctggaatagtagctctgttccttactagttgtgtatccttggaaaaacaactccaactttctaagcattagtttccttatctgtaacacagggtccataatttctaccttacaatgctgttttaagaataaacgaagtgggaaatgagttagtatcatattcatatatggcagccattattattattattattattattattattaaatttctatagtatgttattgcctaagtttgttcatagaataatgtattggcaaataatattccagtaggagaattattcttataaaataaattaaagtaacttactttattctttagagtttaccaagataggtatatttagtgaacatgggagtcaacagcntataataaattctgtattcttaatttaacaagcatttattgagtctctaacaacaagcttagcagtgtttaaaacaccatggcagggctgggcatggtggcttatgcctgtaatccctcactttgggaggccaaggtgggaggatcacttgaggtcaggagttcgagaccagtgtggtcaacatagcaaagcatcgtctctactgaaaatacaaaaattatctcggcatggtggcaagcacctataatcccagctacttgggaggttgaggcaggagaattgcttggatcagggaggtggaggttgcagtaagaactcgccactgcactccactccagcctgggcgacagtgcaagactgtctcaaagaaacaaaacaaaacaaaacaaaacaaaaaaactaccacggcaggaggaatttcaagcatgtgaaagctgttaccaaggataattgtgcctccatcacaggtgtctgcctctccccatctctgctgtcagtgctggaacccacacagtatcacttgtctgggttttcacagtagctgccttaccacttaactcccatttattgtctctccaatccatcctttatactttttccagaaattatctttctaaaacaaaatcatgccatcatcattcacacattcatagacagctgttgtctgtggaaaacacttcagcctcattaagatgtaaggccctccgtactcttgcccttccagctgtatcacctcctgtttcctttcctgcagcctatactccggccataggactaattgcaaatctccattagtaccgtgtccttcccagctgttattttagctagacatgtttttttagccatttcttgcctctcaaaattgtactcattctttaagatataagagaaacaccatcttatctatagtctccctagatgtagaggatgaattcgagtgttaaaagcaagaggtgggcgttgtagtgttctaaggtagggagactaggtatagaaagaaaccttgagatggaaaccaaggacagagaaacttttgcagaatgctgtctctgtgggctgcctgccctgtctttcagctggaagtggttcttcctttctgtgttctctttctctgatgggctgctgagaattattgcatgtaggaagccagagaatgtctcactgttctcccagcagctgctgcttagggctctcttactccactcttttttgattccctggtctcctgcagagccatttattgtctggaccttccctatacgttgtcttccccttagctcaaggcctggcctctccttatctctcctcagagtttgacttctgatgggatctgttgtgctggaactagctgtgatgtttctcttcttcctgcttcacctatgggttggttcctcagcccttatactggtcccactggcaccagccctgacccgattaattccctttcatcgtcctccatacccaaaggtcctgtcttggaccagggaggctcactgggccaagtattcatcacaaatgttaataaatataacctaattttaaaagaaatatctccaaagagtgtagccttctaggagactgagtacaaaaaaaagaaaggggtggagcaggacagagtatgaaagaagactgcaagaaaaggtcaggtacaactgggagagaaaaatgcagaagctgtgggcatgcaaggccagaagtgtagccaagaagcagnaggtgaagtcaaaggtggatgaagggaaagaaagatgaaatgagagaaaaaatcctaggagtcttagcattggagggggaactcaggtgcgagaaatgatctaataatagttgaatggagagaaaatcaatgtatggtcaatcttcattatcacagattatgtgtttgcaaatccacctacttgctaaaatttatctgtaatcccaaaagcaatccttgcggcgcttctgcagtcatttgtggacgagcgtgaagcagtgaaaaatttaagcagtgccacatgtgtatttccagctgagggtgaacaagggatgctcagccatcgtgtttcagccctcatgctgtaagcgagggtcctttccatgatacgtttaatgctgtgtttttgaattcttgtgtttttcactggtgattttgtcatgtgaaatggcttccaagcatagtgctgaagtgctctccagtgctcctaagcacaagaaggctgtaataagaagaaatctggccaggtgccctggtgcatgagaccagcctggccaacatggtgcaaccccatctctactaaaaacataaaaatcagctgggcctggtggtgtgcacctgtaatcctagctactcgggaggctgaggcatgagaatagcttgaacccgagaggcggaggttgcagtgaaccgagatcatgccactgcactccagcctggatgacagagcaagactgtgtctcaaaataaataaataaataaataaataaaagaaaagaaagaaagaaaaaaaaagagaaatctgcatgttggataaactttgttcaaacatgagttatagagctgctggcagggtgtttagtgttaatgaattaacaatatatattaaaataagctatctttaaatagaaacacacaaaaaacaaagttatgtattgattaggtgatgaaaatattgtgaccagaacttgcagaaacctgatcttacatttcccctgggagcaatggttcagtatttgctaattcagtgttctcagtgactttatagaatgtaactgccacaaataacaagaatcaactctgtaaacatttttgttggtcaatggatatgcatgtttagacattttgtagaattatagtcaacccaagtgaaatggaactccttttatttgacttgggaagttgctctattctcttctgtttcaaacaaaactctaaataaaatcctcttttgttctggtttattttagcagatgtttactggtgtttactggcaaatgtgttgagtaagttaggtaaagttgacctagacacagtttttgctcccaaggaattctcaattgatcatggaagacaggagatgtgtgtaatcaacagtattgacattaatttgtattcctggaacaggtatcgactagagtcaaagaaggttttggctggtcctgaacaacaaggaacccaacgtaggttcacaaaataaccacatattgtccatagagtaggtgtctacaacatgctagtgaaggttgacattatcttagagcttcggggatttatagatggaagggatcctacaggcccagtatgtgacaaggacctgagcatgtttagatgtagagctagaactgaaaaccaagcctcatggctgaaactgaatcctttcccactaaaccatacaggctctatgcgctcgaactagttattggagtcccggcttaaaatgagctcatgttccagaaattccacttaggtcagatgtttataagtcagtctgaggttgttccaggatgagctccaaggggtctgttttgctgtatatgaatatttttatagaaggaagctcataaattttcatgtgattctcaaaggagttcatgattccaaaaagtctaagaacttctgtgcttattctgaggttaactgtgcaccacaaatactaaattctatttggggtggtgtcttgacattgtattttgtatccctatcaatctagcagaagatttttttttttaaataaagaaaatgctcactcttggctaggatgtggtgaaacaaaacttcctatattgtcagtggcagtataaattggtatgaattttctaaaaagacattttccactttttgcaccagataccaaatttgtctttcaataatatattctaagaaagcaataagaaaaaggaagtaattagaaattatgtataaagatatttatagcatttttgttcataatatgaaaactaggaatcaaagtgtctaagaattacagttttaaaatatcacttaggccgggtgcggtggctcaagcctgtaatcccagcactttggaaggctgaggcaggtggatcgcctgaggtcaggagttcgagaccagcctggccaacatggcaaaaccctgtctctactaaaaatacaaaaatcagctaggcatagtggcgggtgcctgtagtcccagctactcaggaggctgaggcaggagaatagcttcaacatgggaggcagaggttgagccgagattgtgccactgcactccagcctgggcgacagggtgaaactccatgtaaaaaaaaaaaatcacttaatattatgaaaaactgtttatgacaagacatgatgtgaaaataatcatggcatatatagcataatcacaatttgtttatgtgtgaacagaataacatgttaacagaggttatcttttgctaatnggactagaggtgtttcttttcctttttattttttctttttgtatttttcaaattgtctaaaagactatatatttttataatcagaagaaatattgcaaccatattttgtcccanttgaactatgatttacttacgggaagtcctatccttgtttcttagtttctacattttaaaatgtctcatcattcattttggctgaaagttaaaatgcaatctcagttatttcacgttaattcaattacaagcccttctcttcccacagtatcatttcatcttaaaccttcatactcagcctcctttgcaactctggcctctcttgctttccattcctttttgttctttctctgattaaaaaaaaatactaaattctgtctgcttttctttgacagcattagccttttttctcctctgctcagaatataatttttgctattcagtttttcaaatatttaccactgttccctttgtttctttatcctggtttttaattttgtaaggtagaggaagcattcatggaatagtctgttccaaacctcagagcctcagtagtgcttttgcattaattaaaaagtatgtattctttttgggatttcccaaagtattttcccattatatcaggaacacatgtgtatatgtgcatacatagggtatgcatgagaatgagtgtattcacgtgtgcatgtatgcattcatgtttgtgtgcatgttggtgcatacatgtgcaagttggtgtgcacttgtgagtgaatacatgttccagttcttccagaacaggaactgtgtcctttcctatatgccctacgcaagtagacactgcaatgatgctgactgcctgtttgcctgtctctgtatagccacctttcagagcttgccatctggatctcagacagtatgcagaggagaggaatgttctaatccaccctggtaccaacaggctggcatctgtactttgaaagctttgatgaagaagatgcaaattgtgttggctgtgtgggcttttcagctgcttcctgactgggctagagacaggcagcataacttttaatctctccaaaagcctgccaactggcaaagagatacatgtattagataagatggtggatctcgatttatatatgtatgaatgcagactgaattaaaatggcaccctaagggagaagccaaggaccaaatcaggagaccctctaactgagtcagaaatcaaggccaggatttataggatgaacatttttaagtgtacattagaatgtaaagtaggtatttgtaattgaagtactatgcttattttatttccataaacctaaggtctggcttcgaagtggcctcagggtatatccgtcagcactgagccttgtaaatttgcctgctaaatcaaacctatgatgaaaagaaccaggcaaataacactgtcttgcagtgtgcaagtcccgtggctgtattatagagtgctcagctcagtgtttcacagtggagaagaacgtacgttgatatgctttctgggtttgagagctcttccttcttcatccagaagacagagctgggtagagaaaaggataaccagcaagacaaaggctttatcccaatattatatgtttaaaactcaaagagatatggtgaaaatgggactttattaaatttgcctgattggaaacaaacatgcaaattgtacaagattcctaaatgtgccaaaatggcaaggagagagccctgacgagcatggagaatagtgagtaatgcttatgtcctaacagtgccccttgccttcattgacctttggaaatattgtgaaaaagtcaaccttttctattctgtctgtatagtcttacagtgtttcctctctttttctccctctagggagttatccaaagcccccttcacaagaaatgctagctttcaggaataatcaatcaagcacacctttgagcaaatgtaagatttatgttcattctatttagatatttgattttgacattgtatcctttattttggaanaaaatgaatgtcacctacatgcagacagatgaggcattttatgcttttgttgggggaggataggtttaggggagctctcccatttgcaacccggctttaaaccccacgtggcatgaagaaatcaattaaacagacagaaactcttctgggattgggaatctggcttctcatttaaaagaatatccccatttttctaaccataataaattttaattttcaagtaaaagccattacgtcaattttaatgtcaaatacattttaaaaagaagatgcagactgttgaaaagatggtggaaatgattacaacctaagcttggagcttactgaagtcaatcaacttcaacctggagcttgctgcagttccgactgcacttagatggttttgctttagtttccccattttagtgtagcagaggctgttttgttacctgatctttttttgtagagagaatgaaactgcctgagggacaatacagtgcactggagagggatgaaataaagtctcaagagctgcttgtactataccacctacctcaaacagcagatgttacagaactgcttttaaaaaaatgttgcctttcacatgtcatgctaaaaatatatacctaaaaagacctaaaaaaaaaaaccttaaaagaactagagaagcaggctgtagttatacaaaagctatatgcaagatcatggaagcaaaaaaaaaatgcataaagacatattagagctttcttaagttccaagggagcttttgataatacattcaaaacataaatgggaaagtcatcagagaattgcatagtccccaggagactgcagaaggctttgaaatggatttaataacattgatgggtcggataggaagcccttattccctttgacttatcatctttcttttctttttaaaattcactttcaggaaatagttacatgatcaactctacctggctgactcaaatttggttctcggtttgaactctagttatctgtatatcttacagctgtccccttcagttgcttatcatgtgacttgtcattctgactgggtttgaagcttacaaaggtcaagaaacacatctttcatatctttggaatttcctctgtaattttgataccctgattgtgtttgcagatggtgtttaacaaatgttgcctggctcactggatacttccagattttaaaaaaagttaacagaatgatcttcaactctgcttccattgttaatatttatgtgctatattctgataaacccgtagaagaccagataagacaaaagcaggagaaacaagttgtagatacaatagtgagcgtgtaaaaggcatttaataatgccttgacatgaataataaacataccagtaataaagatacaacaaccttacgtttccatagattcttgattcctctaaaagcactttcatataataaaggacagagggataaagggaggagtaaatataaatgcaaggaataccaaaggaatgtagacatgaaaaagcaagaggaccaaagcaagacaaagaaaataatagccaagaataaagaaattgagggagaacttactaataacttggaacagttgttggctaaacagcacacatagcagagtatcaaataaatattgacaatgttggtgttcttgtagtgagtagaatatcctatagacagaatactctaggatattctatagacagagtattctgtctatagggtattctgccctgtttatgttttgtcttgttttctgctgagttattagggaaaggagtatcgtggattccctcactttctttctcttccatttttattcgtgatggttaatattgatactagtatggctatctttactccagatagtcaatccacatcatcaaaaagatatggacgtttgagtgatactcaacttcagtagcttagttcagtgatttcacaaaagctcagttaggcttgctgctgagagcataagtgaattttgcccttgttgtaaggttctaaaaatttcctaaccttaggaggcaggtctaaaattattgtctataatgctgaatatagtaacttattataaagaaattctaagaaaataagacatatcaactatgttatagaactgatattaaatctagaactgaaaaaaatacagatagaaaagttctgcctgtcatgtgctagaggctacaagagatccctaaaacacttttattactgctttgaagggataagctccctccaaaagcatggatcaactattttagagatttagagattgacactgctgttttggcaataattctaccttcatactttcagttctggatcagcacagaaaactctctcctttgtcagattgaaaacctgtagcagggggacagccaagatggccgaataggaacagctctggtctacagcttccatcaagctaccaatgactttcttcacagaattggaaaaaactactttaaagttcatatggcaccaaaaaagatcccgcattgccaagtcaatcctaagccaaaagaacaaagctggaggcatcacactacctgacttcaaactatactacaaggctacagtaaccaaaacagcatggtactgctaccaaaacagagatatagatcaatggaacagaacagagccctcagaaataatgccacatatctacaactatctgatctttgacaaatctgagaaaaacaagcaatggggaaaggattccctanttaataaatggtcctgggaaaactggctagccatatgtagaaagctgaaactggatcccttccttacaccttatacaaaaattaattcaagatggattaaagacttaaacgttagacctaaaaccataaaaaccctagaagaaaacctaggcattaccattcaggacataggcatgggcaaggacttcatgtctaaaacaccaaaagcaatggcaaccaaagccaaaattgacaaatgggatctaattaaactaaagagcttctgcacagcaaaagaaactaccatcagagtgaacaagcaacctacaggatgggagaaaattttcacaatctattcatctgacaaagggctaatatccagaatctacaatgaactcnaacaaatttacaagaaaaaaacaaacaaccccatcaaaaagtgggcgaaggacacgaacagacacttctcaaaagaagacatttatgccaccaaaaaaacacatgaaaaaatgctcaccatcactggccatcagagaaatgcaaatcaaaaccacaatgagataccatctcacaccagttagaatggcgatcattaaaaagtcaggaaacaacaggtgctggagaggatgtggagaaataggaacacttttacactgttggtgggactgtaaaccagttcaaccattgtggaagtcagtgtggcgattcctcagggatctagaactagaaataccatttgacccagccatcccattactgggtatatacccaaaggactataaatcatgctgctataaagacacatgcacacgtatgtttattgcggctctattcacaatagcaaagacttggaaccaacccaaatgtccaacaatgatagactggattaagaaaatgtggcacatatacaccatggaatactatgcagccataaaacatgatgagttcatgtcctttgtagggacatggatgaaattggaaatcatcattctcagtaaactatcgcaagaacaaaaaaccaaacacctcatattcttactcataggtgggaattgaacaatgagaacacatggacacaggaaggggaacatcacactctggggactgttgtggggtgggggaagcggggagggatagtattaggagatatacctaatgctaaatgatgagttaatgggtgcagcacaccagcatggcacatgtatacatatgtaactaacctgcacattgtgcacatgtaccctaaaacttaaagtttaataataataaaattaaattaaaaaaaaaaagaaaacctgtagctctggtatcatagtggctgtagtgactggttgaatgatttaatctatttcagcctcagttgccnnagctgttagaggagttaattatatcagtcctgccttataatcatagcaataattcccatttccaaatgcctgccatgggtcaggttcttgctatgtctttggcacatattatctttaagtctcatcaactctgcaaggaaggaacaattgtcattcacagtttacagctgagaaagctgaggctcagattatttcagtaagctgcctgaagtcatgcagctaagtggcaaagccaggatataaacttcatatgtatgttcacaaagtccccgcttagtcctccatggaatttttagagttatttaaaatgacatgtgtgaaagtgttttgaaaatagcaaagttccttgtaaatgcatgttattattatcatactgatgaatataaattacttaacatctatttaccaagttccttatagatatttagcactgagtcagttttcattttggacaatctatggaattagttatttctctaatgtagtattacataagatgcattataaataaatcttaaatattttcaagtggaaatttcttccatccttgggaccaggttcttccttcttctccttcttcttcttttttatttttatttttttgagactgggtctctgtcacccagtctgggatgcagtggcacaatcatggatggctcactgcagcctcgaccttttgggttcaagtgatcctttctcctcagcctctccagtagctgggaccacaggtatggccaccacacccagctaatttttttatttttctagagatggtgtctcactatgttgcctaggctgatctcaaactcctgggctcaagttatcctgtttcaatctccctaagtgctgggattagaggtatgagccaccacacccagcctgggttttagtttctttttgatcatatttggagaaaaaaagaaaagaagcaaatttgctaatcaaaattgagtgaatgtttcaagaaacaaaaccaattaaatgtagtccaaccttgagaatcagcaagtaaaaacctctgaagccaagagggctaacaggaaaactgaaggagaggagagaaatataccataagcattttcaaacctctgcttcaaattcttgtatttataaatggtctgggccagcagtgcaactctccctgtctcgctctttgttgtttattttttggagtctttaatgaccaatcgggttgctgaaatttacttgaagagtttattcttgattctgaggtataagattttctgtgtgaagatggctgggaatccacacaactctcctaaaataagcaccaagttttggaaagaattttctcttgtggaaaacatccatttccaaagagagccatcagcatgagattgcttttttttctttttaaccgcccccaacccaaggagaaagctgaggggagtcagtctgtgaagcagccaggaatcaactttcatgacagttttaacattcaaggcagacttttcccttggtcttttggaagaactgctgaaatctcaatgaaagttcatgaaattctgtagaggaatcagctgagtctagaaataagctgttccttattgtttcctctgtttccttatatataaagagtgggtaaaaagaagcaccttggaaagtcattgtgagattaaatggcataatgcatgcacatctcctggcacaaactaatcaccactgttgtgttctaagccagtttcctaaatacacagatccagttgttttttaagtctcagtgtgaactgtttattctgtttggcccatgtggatatctaaagggttcacaaaaatgctttcaaattgataaaatatggaggaagccgcttttctagtcttcatcaaggatctgcgttgggtggaatagaatctttgtttgggtttggtaagagtttcatgatgcaggattttatagagagggagctaatgccattgggtggctgatcacctaggtggaatgaatgtggggccactcatccatgcatttttctgcaggtgagatgggataggtagcccttgtacagttcttctgtcagagatcttggtcacatttgagtctctgctgggctaaggcagaagcccttataggaggataggaccactacctggccaggcttggttttctttagctcagagcctggaattggctaaatttgaacagacaagattaaaaaaaacaagctgattatacaagtgatattgtaaagaaaaagctagataccataagagctggataccagcccagtgttgctgtttggatttgatcatactctcttgagtacaggaacaagagggcagcctaacattgtccctgaagccctctgcccacagccagtcagatccatgtccaaccttagcagctaggatgctggccatccctgtggcccaggccccatttgtacaagttctgggactggggtgaaggtattcttgttataatgcctttttaacacaattctggccttttgggagagagagtcaatgttttacactctggggantcaacttgtgctcggattcacctttggcaagggtcctttagtggaatggactctgcccagggagtcagtggactgctgtttgctggttgattttagacaagttactttatgtttgtgggcctcattttcctctgagcaaagacatctctaacctgagtcacagcacaatctttgtggtctgactctgtctggggcatggaaaattgtgtgtgtgtgtgtgtgtgtgtgtgtgtgtgtgcatgtgtgtgtctccagtcactggttctggggatgttcctccaaactgttcttgccttctttctgttatccaaacttttctgtgcagaagaacaagatttaagtttgaatggatcattgtttcttttcggctaaacaactgctgatagtcagaggatgacctatttctgaagcagacgaccaaggagaaatttatggatttctattctttagacttaaccagtgttccttcttggaacatatgttatggaacttgactaatcgccctggcaatatgttgccaaagttttcctggcaatagatcaaagtctgtaatataccagcacatcagctttgcagagctcagacaatgagaaaacaggtaggggtgggagaaagcacttgcaattaattttggagtcagattttgatagaaaagtagaaagaggataggactaattgacttctgaaagaattacangtggctggtgtgccccatgactcacactgtaatctaaatactttgggaggccaaggtgggagggtctcatgaggccaggggtttgagatcagcctggggaacatagtgagaccctgtctctacaaaaaataaaaaaaattagccaggcttagtggcatgtgcctatgatcccagctgcttgggaggttgaggtgggaggatcacttgcaactgggaggttgaggctgcagtgaaccgtgttcacaccactgcactccagcctggacaacagagcaagatcctgcctcaaaaacaaaaacaaaaacaaaaaaaaagaaagacaaaaaagaattgcaagcggccaatacataagagaagatgcctaacacctaaccccccaattagcattgtgattataaagataacaatgctatcatttccccacatcattttggcagaaatgtgaatggatggttaaactcggtgtgcctgtgagtttgatgaaatggatgtgctcatacaactacctgatacaaccttttggagggcaggtggctgatacttactgaaatgtgaaatgtataatcttcttgcccagaaattctgggtctaggacttatcctaagaagacaactatacaaatgtaaaaatacatttatgtagtatgtttgcaaaagcatattcatggggaaaatgagaaataactttaatgtttatcaatagagaactggtatagtaaattatgataaatacctactgtgaaatcctgcatagtcaataaaatgatggtgtaaagcttcatatattaatgtgaaaaattatttaatggtacaaaacaggttatgaaacacaacaatcacatttctatacagtcatattactagaaatatgggaagttgttaatttaaatctgaacagttagaatttcaggctacctttacttcctttgctatttaactgtttcctctcccacctatcaactctatgtccttagggaaacttatttaacctttctcactcttggtgaaaatggagataataccaaactcttagaggttgttgtgagaatcaagcaataaaatacatgtcaagcacctagtaaaaaatgtattttgatttttttttgtcatacacagtttcctttttttctttcattatgtgagtacaaacagctgtgttcctatgcccagattcaaagagagaaagctaagtgggcttttgaataacttccacttattttaatgcagggaaagctctagttccaaatatgtggaacagtattttcctaaggctgcaatgtgtcagaaaaagaccatattgagtcattgttttctgaagccaagacaggagattgagagacggatgctgatgggcagcctaaaataatatttcattcttgtcatccttaggcagtttaagaccaagtcattttggatagatctacagtttccctctcggtttggaagaacaaagcttttgttatttatgttcttaaacaacagcgctttgtcctatactcaggagcgtgcaaagcaaacagaagatttcctgaacggccatcccatttatggtgaggagtcagtccaagaggtaagtagacatactcagctgcaaccatctgcagagggcccacattggcagcaaaaggaaatagccaagactcacaggagcacaacagccagtcaggtttgggattcacttctctgatactgtgccaaagttggtggactcagccattctgaaactcactgttcacttggggcctgctttgcacaacaaaacaaatagccctgttttgctttccatgtctgaggcagaaaaataaaaatggcaatattttgagtgtttttacattgggaatttctggtccatagataattatttcagatacccctgtgtaatcttttcagagctgttgaaaactgtggaataggggataattagggctcaagagatttcattaatggttaaaggatcattagaaggacacgtactgtatccctcttcttatttctcttcctgcactaaaacaactcctggcttgctaccatacttccgcacccatgtgcaattttcacttagcaaaaggtcaagtctaagtagaatctatgaagttgggattgattctgattggtaataatgctagctagcaagcattgaaaatttgtaccaggttttctgttaagtagtctgcatgcactatctcaatgattcttaaggagtggtccatagatcactggctttacaaacattgacgcatggtggtgggtgtgggcaatgaaaaggcagattcctagattctactctagatccatgggatcagcatcctgtagtgggagccagggatctaccattttagcaggtgccttgggtcatcatccttatgcacatgacattcgagagccactgtgttatttcctagtgcaactgtgactcagtgtaatctgctttctttccactcctctgatttctgtgtgtaaattttcatgacaaaagttagacaaaataccatggactgaagttagatatagagcaactcatgtctcttttagttgctggtgattgcaaatntatctccatggccaaattgcttttgaggcactatatgtgatatttatctgtattgtgggaaggttaaagaagtgagaactctttccttgcttagtggtggcctgtgctctggaggtagagaggaagacacaggggccatggaggtgggacttacaggtgtggtacaggttgtataatcatgatggtgaccctgcatggagaagggaaagcttgaccttttccttggctcagggctatgcaaatagggctggcccatttctgagaggggaaggtagctgatatgcaggtgtgattccctagggcccagaaagacctgcctgccttctgcctttgttgtcatgcttcatgaggcctgaaatgttcactggtggttatttctctggttctcagctttagctctagaaagcccctattgaaatgacatgccacttggaagatagcaggaccatttacttatattttcacagactgctttaatctgctactctggggatggcacacaaaaagatttagttgatgggagggaggttaggcccctttgtgggccacaaagaagaatctggggagcccagggagactattctgggggtagaagtgaggaggaaaggctctaaagacaaactggacctatgtcacagttccgagggctgtcctccagaatacattgttttcctgaaattctccagccccttccatcattttcctctcagtgaatgtccagtgctgaataactgcccccttagtcacaggactggactgcagcagtgctgcaggtggtgaggctcagtggcacaagtggctctgggagggaatcttgatgtcggattctgtagctgcaccagcagagggggaagagggagataattacccacctctgagtctgagatccccctacccccagtgcattcttctgccaggagcaggatcattagaataagtgagacttagcttagctcattcaactccttgccaggccccatgcaaagctttcaaactttcaaatatacgatcatttctagagactatgttgggatcccctgcatttctttatccatttgttgagaaggaccagagatgatgcctaactttagccaagagtttgtctgtgggtccgataagcctcacatttgattttattggaattttaatcttgcagaaagtaccctatgtttcaattttaaagcattttttttgttaaactgaaaacatccctcaatttttccaatgttcgtttgtcctctagtgctaatttatgtggtaagtggtactggttcattaatttactcaggagggtgtaaccacctttcatggagaaggggtggctaggaaggggtttctagtgaaggaattcatttttcttggtcttcatggtgggtgctggggaagggtgtgcagtcagaggggctgcatttgcagaaacatggctctgtgtgtgagcctgggttctcaggaataggaagcaggtaggtgcagtgggtgggtattcatgtgacagtggaggaagataaggacaaagatcatgcatgagtagtgaatgaatgaatgaatgaatgaatgaatgaatgaatgaatgattgtgtatagaagtccatactccttctctggggtggctattccttcaccaagcagactctgttctttcttctgctgcttcttagtgagcacgtctaagtctcagttgatattctcttgctctgagaaatttctcatcaatgggaggagaaaatataattcgcttcaacatagctcatatttaagctgagaattcagcatgaattccagacatggttcatgtattttggataatcagcatagctgttcatgatcggtaaccctcttttttctcctccttcaaatcgtttttggttaggttaccatgactgaagattaatgacttccattattttttttccctcatgcaggaatgtttaaactagtctaaactttgtaccaactatcatatgaatcatgtctactactgttaccccttgtgtgtcatgtcctgggttagtgtccttgcatgacacagcaaaatacagggcagggttaaaagtgtcaattgagaaccaggcaaaaaactgatgattaatagtgaccaacacacttcactgtgctgttatcttagaggccttaaggcaaaatcttacttacaaatattagttgaaatgcaatatgtgatgttagtagacacatttcaccacatctggcagttcattaattcaccttcattttttttttcttttcttcttttttttaatcttttttttttatactttaagtactagggtacatgtgcacaatgtgcagatttgttacataggcatacatgtgccatgttggtttgctgcacccatcaactcgtcatttatattaggtatttctcctaatgctatccctccctcagccccctacccactgacaggccctcgtgtgtgatgttccctgccctgtgtccaagtgttctcattgttcagttcccacctatgagtgagaacatgcggtgtttggttttctgtccttgtgatagtttgctgagaatgatggtttccagcttcatccatctccctgcaaaggacatgatctcatccttttttatggctgcatagtattccatggaattcaccttcattttcaatattgtgtatatttattgcagtgagcttaatcctaataaaaacaattttatttctatttatttatgttttttcaattttttctttgagacaggatctcactctgtcactgaggctggagtgcaatagcacaaccatagctcactgcagcctccaactcctggacttaagtgatcctcccaccttggcctcccaagtagctgggactacaggtgtgtgctaccatgcccagctatttatttatttgtttctcttttttgcagagatggggtcttgctgtgttgctcagggtggtctcaaactcctggattcaagtgatccttggccttctaaagggctgggattactaaaggggcgagccaccatttctagctgacaattttcttttttttttttttttaattatactttaagttttagggtacatgtgcacattgtgcaggttagttacatatgtatacatgtgccatgctggtgcgctgcacccactaacgcgtcatctagcattaggtatatctcccaatgctatccctccngacaattttcttttaatgagcagtcaccatataataggctcagttctaagcatgtatttgcccatttaatcttcacaccagcctaggaggtagttactgtgtgtggcacccttttatataggaggaaactgaggcataatgctgttaagtagcttgctcagggtctaacaattaagagtcagagctgggatgtgaacccaggtggcctgactccagagtttctaccaaccaccatgttatactgctttacatgtttaaagcaaagatatggttttagcatcaaatattaagaatgcactccccacatttttcttattaaatgtaattgccagtttttgtatatgtcattgtcctaatgctttcgagaaacttagacaaagagcaagaccacagataaatggatccttctgttcaggtctcattacctagaagagttttgactgcaatatatgagtactaaaagttgatggtttatgctaattttaagtgtaatatattttagaattttgtcacatgcattattantatgatttcatattcatggccttaggaagattaatttaaacaataacaacaagaacaacaacaacaacaaaatacaacaaaaaatttcccccatgtgccaagagcaaattttgaggtccatttatccagataaagtgttttgttatctgaaccaagaacatgaactttatctttatagtgaccacagactcccatctctagtatcatgatttttaatttgaattaaagcatttttttttgctttgttaagatgaggcaggccttcttgctgacattttaaaaagcaactatttttctttcagtttacactatgaggcattggctccaactgtcagcattgaaactgtcagcagttccctaccaggaaactggttccaaggtctagggtttccttaggtagaggctggcactgtgaaaataatggggctctttatccatgtcacctggaatggagttaataccctgccagtcttagttgatttgacatactaacaggatgggtctgaacgttttctatagtttactcatgagtgactttctttggcttacgtaaatggcaaggccagacaaattagcttatggacctagcaatcattcttggcccagattttgagacacttttcaatcaaccatagttgctctaatacctgagatttgctgacagtgcttggttcagaaaaaggttcagtttcctgagcaatttttcttttattgggatcatcttaattcttgtttgcggggttaagatgaaggaaatatgagcaaggactgcactcagctatttgggtgacccttgtataccatgagcttcttagatagggcctgatgtgatcaccagaaaacattaattgatcgtgatgacaggagatagtctctctagccagaacctgctaatacaagtcctgatgaattgagaatgatgcctgaaggaagcagactgacgtggtgcattagtaattttaggcaaaagaagataatggtactagtatgtatattttttagtttccttttccattgctttgttttgcacaggctgaagaaaataaatgtaaacagcatattatggtggctcagggtggataataatgggacatcacttcctttgtttcagtgtgaggttgcccctgctatgtgacagctccaaggactaaagatttcaatccccagaaaaatgtcgagtcccagtaacatgtttcaggttatcatgattattatgattataggaggggaagagcagtgctggtcttttagaaagttctcatcatgaatgtgttctggagtgaacatcacttactaacagatgagcagcttgaagttgagtcaaacaaaacttttagtgtttgtaagggtcagggagccaggggacagtctgtaactcagttgtatattgacacagagaatgtacaaaagctgtgaaagcttccacttgaatgactgcggatggttgctggtgacggtcttggacagtaagggttttcttcggagttgtaggaggtgaagtcttcctatgggaaatttctggacaaaaatacaaatgaaatgacttgcaggcctcagtttagagtattgttggctttgtctgtcaacaaatggagatttgaacatgggagttcaaggggattttaatgaaattttattaaggagatgagaagcagggagtctgtgttgaaaattcaataaagggcttgttttccatctcagcctggataatctatgttatctctgagtaaagggggtaacaattctaacaacctggcttccttagaagtttccattctcatatagtcaccgaaggcagcagcactgtcaaataaacaaaggtttaattaaataaaaactatttaaacagagcagaaatattcttccctggctagtcacagattggacaattcaaagaacaaaccctggggggaaattgccaatggattactttttctgttttctgtctattgcaacgtttttctttctggtgtcaaatctcaagttgaattcagtcaattatctacagccaaaaaaagtgcataaatgtctcttctgttactgtttatatgtcaccactaaataaagcaaaattttcttctcagcttcttgccttaggattttataagtccaacaaaacaaataaaatattatgtatattctatcgtcactatgaaagcataaggattgatttagttatgtacaagtttattgccaaagtttttcttcgttgctaatgttacacttgctacaaaatgtattaaagaaacagacaatttgctaaggatttggaaggatttgtcattgggttaagtacattaagtatctaaggggtgtggtgttctggttatgtgtatgtcagtttcacatatttttttgctttcttattttagttgcctctataatcattttgactttaaaatgttttctgcagatcctttaataactgcaaatgtagaagtatggtgtaacaagtaattggtatgactaacactaaaatgtaatgggaaataaggatactattgtaaagaaaacaagaaaaacctggggtaggggagcagtattgattctctcttaggattcctaagattctctgtcccaacccttctaccatggaacattcttatgtggtctaagtgtcaaagaccagaggaactgggcagtaacttatcttctcaattttctctctgaacatagatattttctttaagatacgaaaaacttttaattgtgctcctgaaacccatccctgtcctgtctcagccccgttgactcttctttctgtgggtgggtgaaaagcctacccatctgcaaaggtagctctgaaactgttctggaaaatcctgtattttcctccacaaatgatcgttttagtttcaagtttatttcaggtacattaattctccccctcctcagacttcataacaaatgatcctgcacacgattagaataggaaaatgtaaaataaaatcgaagcatatctagttgcctcagcgactttatgcttatcactttcagtctgcattattctactaaaaataaaaagaaagatgaaaattacctcaggcgtttgctgccgtgcctgccctttggtttctgggacggctcgggtcccgtagcgccggcacagctgagattgccaagccgggaagagaccttgctccaggtgtagctgcgttttccccagatcacctgtccttttcccctccgacaaggaagctgtgatttttctctggcctttagaggcaaagtgattccagataagtagattaatgtgtagaatatctcatctgtgttgttccagtgcagccctttcagctttccagagccagttagacttgttatgaggagctaagtgattggctggctctggagctcagtttcatagattatagcccagcgtacgagaagcacgagtcctatagttggcgtaccctgaggcctgccagttcctgccttaatgcatatgtagtcgtaattgagttctgacacggccttggatgtttctgtcctaaatagctgacattgcatcttcaagactgtgtgagtaatcctgatattttttttttaagctcagtaaattaattacatgccctgggagggagtgattgtaagtagaaaatactgaactagcagatgattcgtttttaaggtgctatactatgtgtatcaagttcaagacgatgaatcttaaagcttctaagaactggcagggttattccagctttgtgccatgaatcacagtcaagctgcattttgaaggaggctgtttgatgcatttgctagctctgtttgttttatggggtcagtaaagtggcagaggtccaacaggagcaggttaaagcaggatgctgggatcaaagcttagagagcacttgagtcaggcaagttttaagttttcccacccccaagcatctcagtccaaaactgagagcaagcagcaaatattataataaatgctttggggacaggggtacacagcagatagggcacagtaacaggagaaatgtaaaatgatggcagcaatacttttgttcactgtaatctgcagccaattgaagacatacactatgaataactaaaacatttttatatgaacaaaaatgctcttcagtggttctgtttatgtggtagagggctgaatgaaaaaccatgcgcttgttgtaaaaaagccttataaaaagtacattaaacacatacagacacaaccataacagaagaaagtatgtggattggaatttgtgattggagcagatcaaattaagccagggaagccgttattaggtttgtatgattgctggggggtaacttctgttgctgacaaggtttaggataaagctggagcagattgaagtggaaaaccagaaaacatcagcatttcattaccttctatagcatacactgcagggtagaattaatactgagtatagactggtaaatgtgagcagtttactgtttgcttttaaatcattattgatttcccctagcctatcataaaaaataatagggcttttgcctatgaaattagtgcttagaaatatttttcttcctcccaaataatttttatactttttctcaatacagcacaaaggtaggtcattaaaaataaaggggttccttttcaagttgctttttgtctaatttttcctctttagacctgtagatacaaatgtatgtatttgtgctatgtataactctcaagcataaatcatttgaacagtatttaaaatcacaggctcctgtggcaaatataaacttttaatagctatagttggcaattacttgccaattcctataaaaataacattagtggcttatttttgattgcacctaaacaactggcatgatttagccagtaggagagaaatattagttgtgttttgcataattttgtgtttagatcacactggaaatacaaagttttgttgttaaaaatatttttgctttctgaaatattatcccctttcagatcacaccaatgaatgaagtttgtagaaagaaagaaaagtagccaacgtagactccttttctgtatcaatcaaatatatgcaaaatacatagatttttaaaaatgtaattttaatacattcctttagaaacacatttacttcatgaagaaacagtataatgagttcatttattgacccagaatagtgagttgatttattgagtttctgtagccatagacacgaatagtaatggttggctcattcttagctatacattcctaactgactgtattagtgggagaaaggagtgcatctataaaataaatataatcccatccctcaaggtggtctggagcccatctaagagtaagaagtagtagagttgaagctgctttatctgaatcagctcctgacttcaactcagctcctctttttccttaggtccatgtggcccacttggtgtagtattcacatctccttccacctttttatgccttcattgtttacattaccttgcttgggctcttattgagatgaatcacataaaaatgcttaattatcaaacattaatcagctgcctatataattcagaggatgtttaaaaccaaggctcaaggaaattctggtgggtgtatactaggagtatttacgtcttgcatcggtactttcctctgggacttccatcacttcagttcttcctgagatgccagagtcatatctcttacttgtgaaagaacagagctttaagaaatggagtctagaggtgccaggtgcccagtggacagtgggctgggggcaaggcatggtggggaaagcaaaaaaaatctcccaaacagcaatagttgatctttcttctatccactcctctcaattttctaaaaccatttttgtctaactgtggaagttcttttgcagataaggttctgtaaaactatgcatatctgccatagacagatggatttgacgaaagatgtatccaaaaaggaatgtatcacatcatgaacttgctaagtgttcatgaatacacactggcatttggagactattaacactacctactgaagcaaagacataaatccaaattgaagaaaatataattttttgattgaattacattttccagtgggtttttttttttttggtgaattttgtttttggaaaaatttgctcttccctccaacgtttttcctgtgttatatataggactgatttgatttcttcagcttgcccaagaatttaataattcttactttgtgttttcaaaagagttgctgtctaccttgagcatgtttttaaaaaagcagaacaaaacgaatgaaacaaatgtccctcttcccacagaaaaagcacaccaccaaggagttaaatgccctacatttctttaagtccctccttttgtggagctagacactggtagaagaggagctttcatttaatttcaagacaatcagtgattccaacttaactataactgtgttcctctaatatctgatttcaagaagcagaacattttggtgaattaatcttagagtcaacgggaccacgctcaggccatgaaacgttttctaagcctcagtctctatgtctttaaaatgaaaataatgatatatgttctggtattttactagattggtgaatatccacatcacaatgagaaagtgcttgtcaaaagaacattgtaatgtgtaatttgtaatgtgctgtacatgtacactattattatgactgtagctcatcacgctagggttaggactctttacttctaaaacatattcccagtaatggacaaaacttttgaagcaaagaaaatcttcactgtttgatcctaatgttatgaaggcttttggaccttacatttgtttaagctcccattgaagctcccattggagcttcaatgctgatccatctattacttgagtattaaaaataccgataggtttactgtgataaacgaatgtggcattgtatgtgaaaacatatttagtaaacttccatgtgccatagtcgtataaatattacatattgcaacaattatcagtatattaataaaaattctttgcaaattttcaatttttaaaatggaaagtatcagatatatttcttattgattggattgactaactttctaagctatgtttgcttccctcaaacaggatgaatgttcctgttggttaagctttctttccacttagatacagcactaagccaatagttagataagcattccttcacagcctacatttggagctgccaatgacgaagttttagaggacatattttcctcacaggaaaaagtgggttaggaaatttagactgacagatgttcttgggttttttttttttttttaattcctgtcttgactctcattattaaattttgctaaggaaataattatgtaggttttgaggtgatgcttattcctagtagtcttttcatctcagggatgcaatgaatggtcaaaatgaccttctgaatgatttgaaagatcaattagcagttttgaatcccaaatttttaggtggttctgcttcagaaaatcattatgctttttggaataatgtccatagctgcatcctacatttcagtggtttcagctcactgctgttatagtttgatgatttcctaacagcaatattggttatgctaaagcagttccccatttcacctgttgaaccctttttaaaagatagaagaaattatagaggaatcacaataagtaaaacgtattaaaatggagtggattatctccacttttatctcacacagctcacccagaaattcatgagagaactttctaggaatgaaacaatttcatttgtagtagtatttgaaaactggatctagggccattgacctgacttttttgtgcctttggtgattggataagaacacttcttcagtaatttaaaactatagtgaaataatgtttttttttaacttctcaataggaatttatttattcagcaaaaatcaggagttaggtgctagaaacacaaagatgaacaatacatggtttcctcaaggagcttataacctactagacatttatttcatgttggcagaacttttaggataattctcaaagaaaaagggttattatgaggttgctacttttctcctcaaaatattttctatgttaataatgaaggaatgaccaatctgtagtatatgcaaaaagtactgggtagaaatatattaattttcttggctgggtgtggtggctcacatctgtggtcccagctacttgggatgctgaggtgggaggatcacttaagcctgtcagttccatgctgcagttgagtcatgattatatcactgcattccagcctgggcaggcaacagagtgaaactctgtcccccacccacccccagaaaagaaacataaaaattttcttataaaattttactttttagagtctccagccttatttaattcagttaccatatttgacaaataaatggtggaaccaagatgttaccaggtttaagtttcatatacagtagaactgtgacaggaacctagagtacctggaactagaatccagatctctgccctttcagtttaggatgtactgacaatatatattgctacttaaaattgctaaaacaaaatttataagcatctatatattttgcagctaggacaattatctacaaacatgatatttaatggaagatatggtaataacatctgagatatacaattatgttataaaatctaaaatcaacaagaaaggaataaagttgtaccattccaggaaatacatttccagagctttagatatccttattagattctacatgttagttttggtgatgttaactgccataacatataaaatctgaaatcttgttgacttaactgagaagtttatttctcactcaatcaaagcctaaagtgagtattcttgatgggcagattcttctcattcattcaagcagtgttcttgtgactccactcttancaccttgttgtcacnaccagcttcctggtgtctgtgctttggcaaaggagaaaactcatagaagtctgctcaccttctattggccagagcttggtcacatggccccatatagtgaaagggaagctggggctatagtcctatttgtgtctgggaagaataaaaagttggtttggtgattgtcttagttcaggctgctgtaacaaagtatcatcaactgggtgtcttataaacaacagaaatttattttttttttacagttctggaggctagaattctgagattagtgtgccagcctggtcaggttctggtgagggctgtcttttgggttgcaagtggctgacttctcctattatcttcacatggcagaaagagggtgagctagctctctggcttctttttgtaaaggcacgaaccccattcctgatggctccactctcatgacctaattatcttccaaaganaccatctccaagcaccaacacattgggaattagatctcagcatatgaattttgggacgatatgaacattcagtcnacaacaatgatccactaagctatttctgccatacctttttttcttttctcttttctttccttactgttcttcagtatgtctatgtagaatctatgccttgtaaccaataaggtaatgaaaaaaattataatatttaccatctggaagaaattaggaaaatgattttacttttaaattcttgatccatatgttaaaaaatttccaaggctattaaaatatcactgaacattgtgattatagagattgctatgatttaatacttatgtcttatagtgaaaaagtagtcctgggatatttttctctctttacctcacccatcctcttctatgtcaggtatttgaatcccttgctttgtagttttataaaaagntggggagaaaatgaacaattgtcaaggaagatgaaatggctaatcaaaattcattcattctccatagttccttgggtattttataaactttgcagtaaatgctaacttcttattggggaaaactgctataaagtaagtgtacaggtaggttttggagaaatttttcttgcatggagttgagcaaatggtgcatctaacataagcttggtttatagtttctgtttttcagaagctagaagatttttctccactctgaacttctagggatcaacaaaagtatttatatcacaaataaaaaaaaacacagttacctctcagtaaacaattttttttcagattattctatttaaaaaatctctccaaatctgttaattttctgttaataaaacatcagtttcaataaaagtcataagcctgtcaaaccaattttagtcctttatcttggatatagtaggttaaaatatttttgttgggtgttaagccaataataaactcagctattttaacaaccaaattattttcctcctataaaccaaatttacaatcaagctacttaagaaataaagacaacaaatagaaactgttttaatcttcatatcctgacctaaaaaatagaagcacgaactcatgtcacattctcatatttatctgattagactaggaatgcctaaaaagaattttcccataactccatttacttgttgtttatttccctagctcattccaaaagcaatttaaaatacaacaccaaaagagtaaaatatcctcaatctgacatcctagcaatctttttattttggtgaaactgaacaataataataggcacttgcattcttcaccctgaggcactgaaaacactgatatgtctcagttttaagattctgaagattatattctatttaatagatattttaagtatatgtattatatttctagtctttgaactaaggcagtccacatataggtataaagtaatgcctcagcatagtgtagcaattattggtgcaaaaggttggtgcaaaagtaattgtggtttttgtcatgaaaatggcaagaactgcaattacttttgcatcaacccataactctgtggtctctggagccagactgcctgggttcagatcccagctctgccacttagtacctgagttactctggacaaactaattaatcttcatgtacctccatttaattatctggaaaatgggataacaatagtacctatctggttgggttgttgtagagattaagtaaattaatatacgtaaaatgctttacattttacgtatattaatttcaaaattgcttcgaatgatgcatatctcatagtgctttataaatgtttgtcatcttattattatttggggaactgattatttcacaaaatatattttctagatagctgaagtttattcagtcagtttcaaaacttctagatatagccagttttcatgggtctttacaaaaggatccctgtatctttgtttcttctgttttagagagattaaatggaatcttcctttggtgatactgattgaggtgatactgagataattaagaggacatgaagggatttaggaagagtgtttgcccctgcactaactggcccagactgctctactgcatcagccctctggcgatgttctaagggtttggacttcagtctactgcctatactagtacccttgctttaaaattcctgctcctattttgctataggctgtaagcaagaaaatagcctagtttctaaaacctatgtataaaatgagagaataggtgtcactcagggtgtcagttctcccctgagagtaaataagacgtgactgcattttttccttctgggtgagggttatgttttagagcaagggttggcaaactactacttcctgtaggccaaatctgttttttgtaaataaagttttattgtaacacagccatgctcatttgtttatatgtcatctactgctgctttcacacactgtaagggcagaattgagtggttcccgcagagaccatatggtctgtatagcctaaagtatttaatatctgaccttttacaaaagagtttaccaaactctgttctagagctttaaaattggacagagacagaaataaatgagatgttactacatttagtagtctccactaacctgcctattcaattatttgcagcaccacatcccttaaatgtattttggagaaacaagaatttattgcagtaggctatgttggataaagaacaaacagccctcagtagcacattgtgaatattaagaggtggtgaagctgtgattgtcaagccaagttgtttgggaatcttcattttagtatttgttgctctagtgtgatcagtanataacatgatgcaaaattatatagctttctgttgtgtgctgtagaatgttgttctagagatactaccagttggtagctccttttttcatgcaattattcaaagtaaatgtaaatatgtctgttgtccttttcttttacatgaaaacttcccccctccccaacgctgtaagattcagaagcatagtgtacagaaaaggatcttgaacttgggtttgaatcctgacttagtcactttataaaggagaaacatcaagttacattgccaccgccagcctcagtttccttgcctgtaaaacagaggtgggaatccaggctatgcttgccacaaaaggaggaccaaatgagactcagcatactagaaggctctacagcgcatattattacctgtgtctttaataatgttctcgatttggttcactttctcctcatacaaagatgtgtatgtttatggaaaagaatatacaatggattctgagtgaactaaaattgtcaactgcactgggtatgagtctgcaagcatgaaggaggctgggtgagaaagcctcttcaaacagcatatgtattcctctggtgtctgctttattattcacttctctaatgtgaaagtttatgctttagtgcagagctcctgggaaatatgcaaagaaaaaagaaaagataaccttggaggggaaaagaggtagtgcttatgccaatacaaaagcatgaatagaagcaaatagttgctggtttcttttagctgtagttctttaagtgaatctggtatatatacaagaaggtagttaatgttttaaagatgaaggaaggaatagtttcttttaatgaaaatagactctagtgctacggaaatgagaagtcccctgtgatgaggctagaggagaattactgaaggatgaagtgaacgtacgtggctccattttgtttttcttggaggccataaagaaaaccagacagcttactcagtgtaagttatttatacttgtaaaaaaaatcaccccatttttataatttaaggggatgctaacggttcagctttggattgcaattacattaaatgtattttctcataaacttgttttcaaatgttttaaaaagatttaaccagaaaatccagaattcttttgctgaatttgttttttaaatgctttagataaaatattttagaattatgaccttgaatttgaatttaagggactccttcaacctcctcttttaatctcctttgttatttggagggaattatccaagttgtntcagttagctattgttgtgtaacaaacagttccaaaacatagttttggattaaatggataaatgattaaaaggataatcatggaagattttcatgagtctaccagttggctggggagttctggttatctaagcagattctgattattttagcaagccttactcatgcattaggagttagctggcaagccaagatgaccttccttggtaaagtcaatgctccttcccatgtctctcatatccctccaacaggctagctcagggatgttttcacagtggtgtctggggtcgaagcatgggcaagtccagttgtgtaaaatggtagttggcaacacacatgcacttttcaagtctctttgtgtgtcacatttgctaacaccccactggccaaagcagtttgtggtggaactccgagtccgagtggaggattgtaaagttatgagtcaaagtgtgcatacataggaaggccatgagttgggccattaatacactcagtctaccagaagtcatttcaccttttttcctccatcttaacagcctcccttttggaaatttaacttttacatactgtgtaaaatcaaaccaaacaaacagaaaaatctcaacttacctggttacttttcagcactgtttttaaagcttggtcagggagtaagttgttattacaggctaaaattaaaattttgcttatttacttacacacttctcccctaactcctcctttttaaagcaaattgagtttaagccacaaactgttgaataatgaagttggttctttttcagttttattcatatctatccctgagctctattctgcctctaatcaatttctgtattttggagccgctattactatagcatttgctgggtgagtccgtggggttttgatcatgctttcatatgttcttgctgtttgatttcctctctccttaactccaggtttgcatttcttcctgcctattctacatgtcatagaggaacttcaaactggacgtattttaaagaatactggttatccactttgcccagtcacacataccttcaaccaacaaatatatatttgttgagtgacttccatactatttcaggcattagtaatatactagtgtaaaagtagacaaaatggaggccatcctagagtttataatctaatggggattgacagacattaaacaaatgtgtgaatacataatttaatgcttggccgtgataagggttattgagaaaataaagcaaggtgagcagaaagggaatgatggcggaggtgctttttttgattagtgttgagggaaggcttctgaagtgagggagtgagccatgacaatctgggcaaagtgtgctgcacgcaggggcattagtggatgcaaggctgtctgaatgacgtttggtgctgcagcagctgtacttccaatggaaagaagggtaggaaatgaggtgggggagacaacaagggaccagatcacgcaaggcctttgtagacaacagtaagctcgttacattctttctaagtgccatggcaatccattggtggatttggggcaggggagagacatggtctgattctggctgctgcgtggggcacaggctatagggagcaagggtggaagttgggaggctatgacagtcatggcaggggctgtgttaggagagtaacagtggagattgtgagaggatggcagactgtggagctctccaaaatgtgtttcatttaaagaagccaaatttagatactgtgatcagttctgccaagtcgagcctgtggagaagtatctcccaaagtagacccaacagacttccggtgacatctcagttacttttaggtgctatgtcacatgcatgaacttttaaattttaatagttactgatgattttaatgtggattagaaatatataaaacttgcatgtgaaaactatgattttacagttattacttggaatgaggaaaaagtattgagtgtagtgcagacttgaatgcagaaatagcaaaaatctctagggttatatctgaatgattggatttagaacatgctgacaggattatttgttagattgagtcctgagggatagtgaaggataactctggtaagtatgtaatcagatttagttattaccccttattgattatctactgaatgtcactctatgttaggcaccttctatangacatttcactcagctttccctgcaacgctatgtgatgcgggtggtaattgtctttttttttttttttttttcatttaacagatgagagaagtgaagttcatagagaataaatagcttgttttaggaagtctctgatttttcagatattacaagattagctctggtaaattctctgcaaacaggaacttagtctgttttgtacactactgtctccttagaacatagaaacatttctagtatataatagacattaatcaatacttgctaaatgaatgaaaggaaaaagaatggttcttgtatttagatcttactcaagagtggtatattttgttttccttattatagaatgaggtttaggaagtaatctcttggagtttaatggaaagccattttcgtcataggatgacttcctgtgtcccctaagtgcaggtttcccaatgtccagaccttggccttatatttttctccttattctccttgaaggacctggctcttctggctataactacatgtgcaatccccaaatctcagtgtttgatcctaagctccagttgtaggatgtataaacccactaacaagcctagagccactttagggcaacataaccttggccaagtgacttaattgcccttgagccttagtctctgtcagtagaaggaagagatggaagaagaaactgagccttgatttgaacaaaacctatgggcactagaagaaagaaagacagggtgcttagggagcataacattaggggggagaagacctagaaagcaaacaattgaatttctattccttttgagcacccttattttgttttctatctagaactttctaaggagttaaaaaaagactcttttacataagttttttcaaaaggcttaaatttattttttcttaaaaaaaggtaaagtattgaaaataaagccattcaagcatttagagtcctggagaagctctaacctgcagctagagcagcttcacacacatcctttcgctgccagcagcagctgcacagagcttgctggaaggtctgaggcagggtgtgacaaactgacctgactgaatgaaggggcttctggaaaggggaggagctccatacaggaacattgttgggggtaaggtgagcctgtggaggatgtctctcctctctgcctttccttgcagagctgggagctgtggagagtggaaagtgtgtctgaatgacttcgcatgtttagtgaagctcattgccagaactgcgacttcccctgttgccttgaatctgctgatcagccctggcagcacacgttttttaaattatttaaaaagggacaagggttataaagatgaaaaccacatttttaccagcctctgcaaactcctaatttggtgggtgaaggacacatcaatgaaatttccagtataaggagtggaggtaagtgctatagtctgaatttttgtatccctctcaaattcatatgctgaaacctaatcaccaaagtggtggtattaagagggggtttgggaggtgattaggttgtgagggctctctctccatgaatgaattagtgcccttataaagagtcttgagggagcctgtttgccccttccatcatgtgaggacacatagaaggtgctgtctataaggtatgagccctcaccagacatttaatctgctggtgccttgattttgaacttcacagctctcagaactataagcaataaatttctgttgtttataaattgcccagtctaaggtttttgttatatatatatatatatatatatatatatatatatatatatatacacatatatatatatggcagctcaaagggactgagacagtaagccagacacagaggtcaacacctgccttgggaagataaaaaaattccaactgggtggatctgagtgatgacttggaaagaataggattcaaattaggccttgaggcaaggatgtgactgatgcttatctttaggaaaaaaaggttgttttactctaggtaaaggaagtagcctcttcaaaggctttgaagcagaataatgcggcgggcgggggctggggtggggtcagggggcatggtacatcaaacagtggggagggtgtagagtgcatagtgttgggaagaacaccatgaaattggaatgacagaggtgaaagcatatggtagtatggtttgcatgccagatgagctctttggactttttgggttggcatggggagccattgacactttggtgagaggatctgaggagtggagtggcaggggaaggccatcatcagctctgtgtgtgccagggcagcaagatttgttagcttaaaaaaactttttgaaataattttaatttagaggaagttgcaagaattgtcaaaaagttttaggatattcttcatctgaatttaccaattgttaacattttgccacatttactttatcattctcttgttctttaacatatacatattattaagagcacttttctaaaccatttgaaagtaagttgcagacatcataccccattacccctatgtggtaatatctaatatctgaagtctgatctccaaactttattcaaatttcaccagttgtcccaaaatataggaggtctctttctccctttctttcttccttcctcccttgcttctctgcctcccttccttcccttccttccttcctttccttccttccttctttccttctttctttctctttnttttctttctttcttttttctttctttttccttccttccttccttccttccttccttccttccttccttccttccttccttcctttctttctctctctctctttctttctttctttcatctctctctctctgtctctccctccctccttccttccttccttccttctgtctgtctgtctttcttcagatgctcctcancttatgatagggttatgtcccaataaactaatcataagttgaaaatgcatttaatatgcctaacctatcaaatgtcatagcttagcctagcctacctcgaatgtgttcagagcacttacattagcttgcagttggggaaaatcacctaatgtaaatcatgtaataaagtaaattacataaatatttcatgtaatttattgaatactgtactgaaagtgaaaaaagtatccaaaatatggtttctaccaaatgtgtttacttttgcagcatcacaaagttgaaaaatcctaagttgaaccatcctaagtcagagaccatttgtagcctaggtgacaatgaaataggcttgagtggaagcactgacagtgagaataagacagccatttcagagttgaacacaataagatttggcaacaatgggctttagggtaagagagggagtaaagctggtaatgaggttgtagtttacaggattgatgtccttaaccaacaaggatctcaggaaagagaatcgaagtgcaagggtgtgcttatgtttcagatttttcatttaataataataattagatttctatagtgctttcaaaggcagaaaggcagtatgattggaggcagcttatggcagtgatcaagagtaggaactccggtgctagactgtctgggttggaatcaggctttgctgcttattagctgtgtgacctgggaaaaatgacctaagttggctgtgcctcagttttcttatctgtgaaatgggaattttaacatcgtttccctcacaggatcattgtgaagattagattagttattatttgtaaagtgttattatttataaagtattataagccattctgacatatagtaagcactgtatgtgtttgctgaatcaatataaataaacttattttcccatattactgaatcctcaccagcaaatctgtgaggaaggtactattattattattgctaattgggactcaggtgttacatggtttgcccaaaaccatataactatcggtaaaaatgctcattctgttccacctaccagactatccccgggctcgctacatggggatacctaataggccatagtaatgggctagtgtctcagcataggcatactttgggagtattgtgggttcagtttcagaccactgcaataaagtgaatattgcaatagggcaagccatgcaaacattttggtttcccaatgtatgtaagttacatttctagtatactgtagttgattaagtgtgcaaatagcattatatctaaaaaaagtacataccttaatttaaaaatactggttgttaaaaaatgctaatgatcactgagcctgcagcaagttgtaatttttttgctggtggagagtcttgccttgacattgatggctgctgaatgatcaggatggtggtttctgaatgttggggtggttgtgacaattgcatgaaataagacaacaatgaaatttgctacatcaatcgactcttcctttcatgaaatatttttatgtaacatgcagtgctgtttgatagcattttattcacagaacttttcaaaattgctgtcagtcctctcaaacccagttgctgctttttatcaactaagttaatgtaatattctaaatccttagttgttacttccacaatgttcacagcatcttcaccaggagtagattccatctcaggaaaccactttcttggcttatgtgtaagaagcagctcctcaaatcttcaaattttatcatgggattgcagaaattcaatcacatcttcaggctccacttctaattctagttctcttgctatttccaccacatctgcagtgacttcctcccctaaaatcttgaaccactcaaagccatccatgagaagtggaatcacttcttccaaacttctgttaatattggcattttggcctcctcccatgagtcatgaatgtttttaatggcatctagaatggtgaattctttccagaaggctttcaactgacattgctcatatccattagaggaatcactgtttatggcagctacagccttacaaaaatatatttcttaaataataagccttgaaagtcaaaattactccttgatctatgaactgcagaatgaatattttgttaaaggcatgaaaacaatgttaatctcctcgtagttcttcatcagatctcttgagtgactaggtgcattgtcaatgagcagtaatattttgaaaggaatcttttttttttggagcagtagatctcaacagaaggcttaaaaaattcggtaaaccataattaaacagatgtgctgtcatctagtccttgtggctctatttatggagcacaggcagagttgatatagcgtaattcttaagggcttaaggatttttggaattgtaaatgagaattggcttcaatttaaagctaccacctgtattggtccttaacaagagagttagcctgtcttttgaggctttgaaactaggaattgacttctctttagcaatgcaagtcctaggtggcatcttccaatataagactgttttgtctagattgaagatctgttgtttagtgtagctaccttcattgaaaatctgttgttcagtgtagctaccttcatttgttatcttagctatattatccagttcacctgctgcaacttcttcctcagcatttgctgcttcaccttgtacttttctgttatggaaacagtttattttattaaacttcatgaatcaatctctgttagcttcaaacttttcttctacatcttccttacctctctcagcccttgtagaattgaagagttagggccttgctctggattaagctgtggtttaaggaaatgttgtcactggtttgatcttctattcagaccgcccaaactttccctatatgagcaataaggctgttttgctttcttatcattcatgtattcactggagtagcacttttaatttctttcagaacttttctcttacattcacaccttggctaacttgcacaggagcttttggctgttcttggcttttaacctgccctcctcactaagcttattcattccgagcttttgatttaaagtgagatatgtaactgtttatttcacttcaacacttcaaggaaattgtagggttattaattggcctaacttttaatattgttgtgtctcagggagaaggagacctgaggagaggagagatttctgggaaaagccagtcagtgaagcagttagagaatacacattattcattgattaagttcgccgtcctatatgggcatggtttgtggcataccaaaacaattacaacagtagcatctgagatcactgatcacatatcaccctaacaaatataataacaatgaaaaattttaaatattataagaattaccaaaatgtgacagagacatgaaatgagcacacattgttggaaaaatggtgctgatagacttgctcaaccagggttgccacaaacctgtgatgtgtaacaaaacacagtatccgcaaagtgcaataaagcaaagtgcaataaaacagataagggctggaggctctggagttgaaagccctctacatggagatgatcattgaagacatgtgatgtatgcagncactaagagagaagctgtagaagaaaaagctgagtgttggagaatgttgcctatggggtatgaagatgaaggggagctggtgactgagactgggtaggagcagtcagagaggtaggagacagaacaggagggggtggagtgaaggaaaggaagaaaagtaagggcttaagaaggacttggccattctttacacaaacaaggcagacaaattcagagcagagacctgggatagtgatgagtgggtttcttagtgaccatagtgagaatggttcattggcttggtgaggacagatgcttatttatggggctcaggaagaatgggaagaaagacntggattttataaatgtgtgctattcccttaagcagattggcaataaaaggaaggaaaactttgaaagaaacagggtaaagaaatgatctgtctccaaaagaggcaattgtcttggtcatccaggaggtaaaggcaaaggcttgaagatgcaggaaatggtggggacgatggagagagctggcagggatagaatcaggagcatggctggagggattggtctcaggaagaaatagagacactgcttcaagattggagggaaggctgggcacagtgggtggctcatgcctgtagtcccagcaattttggaggctgaagtaggaggattgcttgagtccaggagttcaagatcagcctgggcaacatagtaagatccccatctttgcaaaaaggaaaaaaaagttagccagacatggtggcacatgtttatacttccagctacttaaaaagtaaccctgactcttaaaaaaaaaaactgaaggcaagaaagagactgtgtgtgatgacctatgacatttcatatgaaggaaggaaaaattgagataattcacctagaattgcctcaatttttgttgagtgggcaatgaagctgtttgttgagaaagttagaagtatatttgagaatctgaaagggcttgaaaagttaggatgtagactgggcatggtggctcatgcctgtaatccctgcattttgggatgctgaggcaggtgggttgtttgaactcaggagttcaagaccatcctgggcaacatggtaaaatcccatctttattaaaaatatagaaattagccaggtgtggtggcactcacctgtggttccaggtactcaggaggctgaggtgggagaatttcttgagcccaggaggcagaggctgcagtaagcagaaatcataccattgcactccagcctggatgacagagcaggaccttgtctcaaaaaaaacaaaaaaaaaaaaaaaaaagaaaaaagaaagaaagttaggatgtgtattagagatgaaaaaggggactgtccagtgagggaggaccagcatttggactggttgagtggcttggttctacaaggtattatcataggactttccttagtgactgatatggtttggctctgggttcccacccaaatctcacatcaaattgtaatccctatgtgtcagaggaggagcctggtgggaggtgattggatcttgggggtggatttcccccttgttgttcttgtgataatgagtgagttctcacgagatctgagtatttaaaaatgtgtagcacatcccctttctctctctcctgctctgccatgccaagacgtgcttgcttccccttcaccttccatcacaatcataagtttcctgagacccccaagtcatgcttcctgttaagcctggggagctgggagttaatcggacctcttttcttcataaattacccagtctcaggtagttctttatagcagtgtgaaaacggactaatagagaaaatgtgacaccccagaattaaggcagaagaaatggattgggccagtgtaagnatggcttttagtgaaaggttaagaatactaggaaatctcagagttcagagagaattcagttggagatggttgaccataggctgtgaaggcaagaggaggctgaacaaggttcctgtgaaatatccataatgacagagaagaaggaaagcacatttctggggctccaagtagcctcttagaagttggaaaattctcaagtcttaagttttaactttaaaatatttaaaattccagggctgggcctggtggctcatgcctgtaatcccagcactttgggaggctaaggcaggcagatcacaaggtaaagagttcaagaccagcctggcgaacatggtgaaaccccgtctctactaagaatacaaaaattagctgggtgtggtggtgtgtgcctgtaatcacaactactcgggaggctgaggcaggagaatagcttgaacccaggaggtggaggttgcagtgagcagagatcacgccactgcactccagcctgggcaacaaagcaaaaatccatctcaaaaataaataaaataaaataaaataaaataaaaaaatatttaaaattccagtgcngatctgttaaaataaagtagtagatgctagtaggtgattgatttctcagtaaatagacacctaaaatatatatgccatatttttccatgacaagggcctatactgggtgggggtgggctgggaatttgtatcccagtttaagaagactggaagaacaaagaaaagtaagggcaaaatcaactactgagaacaacgaaggggcaggataaattcaacaggagggaaagagtaggaaatgttgaaaaatttgagactggcagatcttgaaaatgagacaatcctagttgataatgagctccaaagtgtaatcaagaaatcttccaagtgatggagataaagagatggaggctgtcttgggtgatttcaatctcattgaattgctcctgacttagattcaatacaaaatttctctcttgtggtgcacagaaaaaatattaatgtttaaaaagatgcatttgtaaaatgttaagccagacatttatttttaaacattgtcttgaagtcagagagagattaatagagccattctaaattttcttagggaacatatttggtatctgcctcctgttgtacaatctctaagaaaagtgagagcaagaagaactataaaattgaaatgccaattgtgatatcaagtaatttttaaatgaatgcatctttcaattcattgataggataaatccttatttactttatccgtgagggtctctgtcttgaacaacaagcagccaatttgtggaattagtggctgtttcaggagggtaagtaacctctcatttatgaccatctcgttcctatgttttaaaataagattgtggacaaatacttccattcaacctagtagatgcattttggcaatggcagatcacccaaacaatggataacaatagcaaaagaaatgatatagtcagaagtctaatgttagccatttgttcctagagtttcgaaatacagtcagttcccaactcatgatggttcgacttagaatttttcaactatttttatgatggtgtgaaattacatgcattcagtagaaactgttcccttcctgttgaattactctgtcccttcattgttcggtgcagttgattttgctcttccttttctttttttttttttcactttcactgcagcatttaaaattacaagagatattcagtactttattataaagtaggttttgtgttagatgattttgcccaactgtaggctaatgtgagtttggagcatgtttaggtaggctaggctaagctatgattcttggtaggataggtatattaaatgcatttttgaattaatgatatttcaacttacaatgggtttattaggacataatcccactgtaagttgaggagcttctgtaattataatatcagatattgatagcttccattggtaagtaacttcaatatttcccactctttttttaaaagcttgacgagcatacaaataataaataattaatgtttctagtagaaaagaggtaagtaacaggaacagaaatcttggaccatcttaaatgaaccaatgggaatgtcaccatgcacatccttccaaactttgtttcaagctatttcatgtcaaatttatgcttatacaagtggaataatatgtatgttatgtcttatgttttaaggaagtcttgacttatggagggtgagcatttagtctcacttttaaactaacttaggaaaatgatctaaagcatagtgaaaagaacaatagagcaagaggaatgaggtgttagtttaatgaaatagtttagtgaaataatgccaaggactaatatattgaagagatatttctttagcttggcatatttcaggaagcaagcgggtgcatttaataaattaaatttttatttaattatttatttttatttatttatttttttaaagatgaagttgtgctgtcacttaggctggagtgcagtggtgcgattataactcactgcaaccttgaactcctgagttcaaacaatcctcccgcctcagcctcccaaatagctgggactacaggcatgtgccaccatgcctagctaatgaaaaaacaaaaaaaagtttatagagatgggatctcactttattgtctaggctggtattgaaatcctggcttcccaccatcctcccaccttgacctccgaaagtactnggattacaggtgtgagctgccatgcctggcctggccttgcttttttattttttagcttttatagctccatatcctctaatgccaccacagtatgatgagtggaaatttgggtaccatgtttagcactgattttctctcttggcgaggaggcaccactatcacgctatgttgagtttttggcagccaagatcagagggactgtcttgtaatggccccatccctgagatctgtgggaataacacaggagacaggcactgactgcttccaggggaagcaacaatcagtgcactgaatgccttaccaagctgagtatcgctgaacttcaaaacagtgccagaggagtagagtttttttaacttcctctgctctgtcaacagctgacttagctgatttttgcctgtgatgataatatccagagtgatgactggattctcataatctgcttctctactgttaaggagggatttttacctgatagcatttctctaattttacttattttattaattcttctatgccaattacttataaattttggcttatttctgatcacactataccatttgtaaaacatgaaattcaagttgattgattgctataattttctcccatccatattctggatgaatcaaagatgaggctggcagtgtttctttccctttgaaaacacttggttcattttcacaaacagaaaaattacatggcttcctggagacattgatttgttcttctggaagggttggacctccattgagaatcactaatttaacaaaaagcccacagatcattgtatgagtgtgtgtgggatggggagggggagagagagaaagaaggaaagaaatgggttaaaatttcattttaaggaatcattttattgttggattagaaactaaagactgtccataaaaaagaggaaccattctaaaattttcataacttgctgtatgtgtgtattttatttcttaataaagctcaagtagtttctcatgaaagtcaatggatagagagccatttcaggacntgtttgaattggcagttggttggagtttggccatggcaggaaaggacagctgtttgttgtggggccttgtctccatggtgttgggcagcacatcttcagctctttctgggaagacctcaaagtaggaatagaccaagaaaaacagcaagagggcatgactgcatgctggtcagatggaattcagcctgtactgctctagcagagcttctccaggggttagaatgttttgcttttatagtcatctggattgtttgtttactaagggtagaaaggtcccagcctcacccaagacctcccgattcagtctctgtggggagctgcttgggaatctgtatgttagagaagctcccaggataattgtgatgtgtggtcatgtttaagagctgctagtgtaaataatggtgaacagtagcactggctggaagcactgtagaaattgtgtgtgtgtgtgtgtctgtgtgtgtctgtgtgtattgtgcaagagctatgagataagatcaggctactggaatttgccaagaagcagcacgggagacacattaactagacgccaaggatgtggccatagactttcctagaaactccctcatctagggtgtgcacgtctggattgcactgactagtcctgattaaatcctgtatgcataggctcagtgcaggctgggctccagaaaaggccatccacaatgttttcttttaaaattccatatactatttatctttgattttctacctcctgcaggaatccctagatccaactttctttggtgagtttgcaggggtttctgatggttctcttgtttcacgggtttccttcttattttctactccttttatttggaatgtcaacctacaaacttaaaagattgagcaaactttgtaggaaaactacagaagttggaaccacatatgatgctttctattatatgcccaaagtctgttgtatatgatgaaaatgaggttttatttacttcttggtacaccaaacacaaacactctctaatgaggaaaagaacccaatgagggggaaaatgctggatgccaatggatggcaatgatttatggaactctgggctcagtggtagtgaatgatcatcttaagggaagacactattctacagttcggtgtagctgggatgactttatatcctagtttgcaagacagtcctggcctcacctgttgagctggtgtcccatctagttaagatacctttcatgctccccagtgtcctggttgagatactccgtttatgtggtcaccgtgaggataggaaacagagagaggagatttttctttggatcactgaatagtactcatttcattatatgatttatcccattccaggctcacccctaacatttgagggcccaggacaagacccccctattccacaacctattccttctcttcttgccctggctccactgtgcaactggaggatccttgtaagaatgtgtgtgggtgagccagcctgctcattcaactttattcacacccacatccactagctgcccatgaacacccctcaggcctaggggtgcgcacacctgtgagttgatctgcttcgggagggtgaagacacacccaggccctggaagctggtttcggaccacttggggcaggaaattcaagggtcatgagtacttggggaagagtctagaagggaagttgtncctgcaggtgggtatgtatcacagccctgcagactgctggttccatggagaggcatggctggagaagggcaggagagggcattctgaagcatcagccccctgattagggatacctggccctagagtggtcctggccttttcactcctgcttttcagagatcctgcttctaacacatccttgagcatctcagtaaagcaagcttcctatgccattctgaagtgtttgggttaagaacgtttctcatgtgaataatgcttggtcaccagactgaggtccagcgtattcttcatctggtctgatagaaatcccttgtctttaaatgtcatatatttaaggtaacaactctattttgtaggttgaaacaaaaacttaaactgtatcagttaatgtttttaaagtcaaccaaagggaaggcacctcttcccagtgtgtttcatcaattgaaatctggtgaatgtttttttgtttgctggtatgttccaccatgtgtgtgagcatgaaggtaggaaaactgtttgctcagccattccctctgtggtttggtttgttggagaatcagtcaaatggaaaggctttcctctgatgtgattacagaatcaaatattttataattcccagatacttctgaatcttgaataattattaaagtcagtgaacactttctctttcttttccttgactccctttggattgaactagcccgcagggcaacacaatattatttccctgggctaggtgcactttcctcttcgtggactattgggtgcctgtagatagagtccctgtgcacagcaggcagattgtgcaccgcatagtcctggaggtaaatttcaccaagagtataagtgggattgtgcaaaatggtagccctgcctatgcatgtttggggcagggattccccccaactgtgtatttcctgggaggcctgattttcctcctctttctgtcacccatcataagcatatggagaagatggatgtttgaagggaaaataatgttattttctgcattttctcccattttttgagagcactcattctccttctaatattaatttagatcagggaaaataaaagccatttgttaaagaactaactattatataataaattatcaaacaattacgccaaaggtatgtttacaaactcctgttctatcttggtgggttgattagcttccttggggggtccaaacagctatggcttttccatttttataaatggttctgcatttataaaattaagaatggacatttatgctattaattaagaatggaattaatagtgtaaagggatccttcaaatacccatgtgttattgctcaattttaaccaataaatcttataccagagtgttctgcctgcttccggatgagcaaggagacttgtggtctggttcttggacttccctagcagcatggcccccaaatgccagtctccactcctgcctcaaaagaagaaaccaagaatgcctcctgctctgggaccggaggagacattggcctctgcaggcttgctgaggaagggagaaaaagaacagcaagaagcaattgaatgcattgatgaagtacaaaatgaaatagacagacttaatgaagaagccagtgaggagattttgaaagtagaacagaaatatgacaaactctgccaaccattttttcagaagatgtcagaattgatcgccaaaatcccaaattttggggtaacaacatttgtcaagcatccacaagtgtctgccctgctggaggaggatgaagaggcactgcattatttgagcagagttgaaatgacagaatttgaagatattaaatcaggttacagaatagatttttattttgatgaaaatctttactttgaaaataaacttctatccaaagaatttcatctgaatgagagtggtgatccatcttcaaagtccactgaaatgaaatggaaatctggaaaggatttgatgaaatgttcatctggaaaggatttgatgaaatgttcaagtcaaatgcagaataaagccagcaggaagaggcagcatgaggaaccagagagcttctttacctggtttactgaccattctgatgcaggtgctgatgagttatgagaggtcaccaaagatgatatttggtcaaactcattacagtactacttggttcccgatatggatgatgaagaagcagaatgagaagaagatgatgatgatgatgaagaggaggaaggataaaaagatactaatgaagaagacaatgaagatgaaggtgaagatgaagatgatgatgaaggggaggaaggagagaaggatgaaggaaaagattactagaacactgataggttccaactttcctgtttaaaaatttttctccagtccctgggagcaagttccagtcttttctttttcctcttgtgctctgttgccctgttgttgaggtctctttgctctacaccatggttctcaacttattgcagaatacaatgggaaaagtgtctctacgcctttctgtttgaaattcatttttatccctttctgtctgaacaaaaactgtatggaatcaacaccaccgagctctgtgggaaaaaagaaaaacctgctcctttcattctgctggaagctggagggtgctaggcccctgtgtagtagtgcatagaattctagctttttccctcctttctctgtatcttgggcttagagagtacacggtgtctctatgtgaatatggacagttagcatttaccaacatgtatctgtctattttctcttgtttaaaaaaagaaaaaaactaaaaaacaaaatgggattatagaaggtcagcaaagggtggatctgagatgtttgggtaggttaagtgggcattttgacaacatggcttctcctttggcatgtttattgtgatatttaacaggcatctttgtagtttaagatgacacttttaaaataaattatctcctaatgatgacttgagccctgccactcaaagggagaatcagaagaacctgtaggatcttatttggaattgactttctctattgtaattttgttcctgcttatttttaagttttctttttgtttcactgtaaaggaaagatgatgctcagttttaaacgtgaaaagtacaagttgctttgttacaataaaactaaatgtatacacatacacacacacacaacacacacacacacacacacacaaacttataccaaaatcacaccactttagttagttgtccactggaaaggtgctctttgttttcgagcttcaaagaagctcgtcttcttttatttgactgtcgctagggactccactgagcaggaatgactattctgatatttgcttgttacatttttggttttcagaggtggcatattgaggaggtgcacttatggattgcagcataagtatccatgagtccgggtgtggtgcgtgtgctcactcattatcttgatgtgctgctcactaccacgtctctcctttacactattggaaactttcattcttaataatttaatttatccctagtgactccagcctcccatgacagactaaaaaaccagacttgatgaagtccagatatattttaattctcttctatcaagcccaagggagaatttcttagcgactatgctgacttatgtcttgaaaaaactttaactttgggaattttgatgtataatgaagccaggagagggagacgtgtcattccaaaatgctgcgaatagaatttaagcaagcaacatgacacacattctttgtttcttttgcttttttttttttttttttttttttgcaatgaagtctcaccctgttgcccaagctggagtgcagtggtgtcatctcggctcactgccatctctgcctcctgggttcaagtgattctcctgcctcagcctcctgagtagctgggactacaagcatgtgacaccatgcccagctaatttttttgtacttttagtagagatggggtttcactgtgttggccaggctggtctcaaaatcctggcctcaagtgatccacccgccttggcctcccaaagtgctgggattacaggtgtaagccactgcacctggccatgacacatattcttagctattctccaaaagggagaacactagaaaagtggtaatttgaaaatagaaactgtccagtagcaactggatggctcatagctccagtggttctaataagcgctcagtggagagtctgatacatattaggtgctcaagaaaatatttgttaactgaataaacaaatcaatcggatcttgttcagagaaattccaaagcagagaatatctgccacaagtgctcacatcaaccatgcctattaagcagcaccatgttgtttgctctcgcagaaagggatttgatttggcatttgctgaaacaggcccccatcttacagacggcattgagactcggaagagttaaataatttcctcacagctactaagcactagaactagaataagaatgtgtgctttctgactctgagtctaggattctaggacttcaagggtttcctatctttttgaagtcatggggcagaacaatataaaggaacagctggaaaaactgaaatgaaattactattcactcttacataggaagaataaagataactcttgagggccctgatatattatagtaataaaaacaagactgaggtagcagaagcacatggacatgcagggaacacttccaaacatccttcaaaaggcctaacttctaaggacaggaaacatgaggaagcagagaaggaaggaaatgtgtctaaattcttccaagctgtttcttttactattcaggccaagccttctatctcttaaatcaaaatttcagggaaagcttatggcagatgagacttttgggagtacattagaaaacaggagggaaaaaggccttattactcactgatttgtatccttgtgttattttataatattattaaagctctttccatgttatatagattctgtctctcagctgtactgcaaatctattaggacaagtctcgtctcttttatgtattccttctactgtgtctatatgtggtggtctctcagtcgagcaggctgtacagtttattcgaagtgttccaaggagcttgtgtgcctccactgctctgacctcatttttgcaatgttaattaagttgggtagatgacctattcgactgataacactcactagctcactagtatatggtaagtagtttattctcttagttagttgaccgtgaccagattaaagcccaaaaagacaagaaaaaaaatcaggtggtagagagtggggaacagaggtataggacactgttttgggaaagtggatcttcttgtgttcctacagaggataactcgggcntgtcaggatgaggtattacaagaagagagaacaagagnggaggctcaccattaaatttggcttctggccttgggtcagccttgcatgatgttttgtagactgagagtaaggaaggagaagttgagacaaaaactttactctctgtttggtcactgagagtaaaggttctctttgtgctagcttattcttaagcagtatgcatgaggcatttaggggtttattgctgaagaaaattcatcctcttgtgctaattgggcagggattccaagggattaaaaccaaaatcatttgaccacctgagttacagtaattttagagcttaggttgtttattttcactgtatagcacaaccaaatactattcagtctggctgcatggaatgagatatggctaattagatttcctggctaacccaggttaaggcagaaatgccatgttaacagtagcacccttaaacctggggaaagaggctcttgcctcgtgtcacttgctttagagggccctactggtcttcctccactgtgccatgccttatggggagacgattctgcagagccatgtggatattgtcaatccaaagcaccccattccctcttctaaaccacttggtaccccacaattcctacctaagtgatcccaagatgacttccagggcctacgtgggtctctcttgagttctcatctcccgaaggtgaactgtaccacttgtgttgagcactcctaggaccaaagagtgtggggctgtgcatgaatcttagatgtttgggctgagatgtccttgggggtgtgtgcaaggcccctcactgcagaaaagaactgaaggtggggaagagaagagaagggagtgggctactggctggagaaccctggctccaaaaattttaggcatgggctgacatttctaactctccagtgggaaaccatttaaagcagtcaacacattgactacgaagtgcaggcactactttgagtaactagacttgatcgcagaggtccttgaatggcctcctggtctgcatgtgtaacaacagtggttattgttctctggactctaatgctgtaggtactagatgtgactgttctccagagacattcctagggagttgctaatggtggtggtggtaattgctattattatttcatgaacattgaaatcttttatttttttgtaaagttgtctccttgaatactggactgtaaaggtgtgtggatgtgttctagcaaattgagaattgtagttaattgagttctggttatttaactttttactgtagtttgtacttgttgcttgttcagagtctaggcaattttacatgggcttattttatcctttctccctatctccattagtcttcaagatcaggaaaatgatttatgtcattttaaaatagagccttcctctgtctctcattttccttcttctctctctctaaggtatattattgcctactatatcctgtgccctgtgctggaatttctcttgtgctaatttttattgataacatatgatggcttaaaatgtcatctagtgtttagtaaattcataatagaaaataactttgttccctcacaaatttttacagacatttaaaattagcacttcaatatccaagtattttgctttttcttttctggagagaaactaacacctgtaggtatttgttgacatgcaaaaaatgcatgcaagaattttaaaattttataccctataattggttgtatactattaattagacctcttctttagctctcttactgtatacactcttctgttttcncaaattctctcctctttctctaaattcctcaccctgttccccaccctttccctgccttgtctctgggtttttgtctctcttgcctcatttttccttctttctctctcactttcttcccccaccccttctctcttgtttacactccccgctcatgtatgtgccgcttcgtctttgtgtttatatctaccaggggaaagaccaaccatctttatttttaaattttattttactttaagttctgggatacatgtgcagaatgtgcaggtttgttacataggtaaatgtgtgccatggtggtttggtgcacctatcagcccattacctaggtattaagccccgcatgngttagctatttatcctgatgctctccttcccctcactgcctcccaacatgccctggtgtgtattgttcccttccctgtgtcatgtgttctcattgtttagctcccacttacgagtgaaaacatgtggtgtttggttatctgttcctgtgttagtttgctgaggatgatggcttctggcttcatccatgtccctgcaaaggacattatctcattcctttttatggctgcatagtattccatggtatatatgtaccacattttctttattcagtctatcattgatcggcatttgggttgattccatgtctttgctattgtgaatagtgctgcaataaacatacgcatgcgtgtatctttataatagaatgatttataatcctttgggtatatacccagtaatgggattgctgggtcaaatggtatttcaggttctagatccttgaggaatcaccacactgtcttccacaatggaaccaaccatcttttaaagtaacaaatgacatctaagtgtgaagtccgaagtcaaagagctagagagtcatacagtttcagagttgtcgcagttttgatgattgattctctggcagggtcgtcctcattttgtacctgaaaatatagttctagtgaattatatcacttgtccaagcccacacaatgaccaggcttcctagccctgatttatcagtccagtccttttcttaaaaatagtttctgaatatatgcaggtaaaaataataaataagccatcataagttacagacatgtatgtctgcttctatggtgccaaggaaagaaaacaaggggaaggcatgaacataaaataacacaggtgcacttatacattgtttcttcaaaagatcatgaaaggatagcttagaaattgccagtaagaactatgacaaacaagctcagacaagttactgcagagaggagtgtacttaaagttagaaagcgggagaagtacacttgtcaacaggcagaaaaggaggagctatggaccttacaattggaaaatgtgattaaaaaaaaaataacgaagctgatccttcttgatttttcttgttttgaaatttatggcaaccagtacaacaaacctatttgaatgtataaattaaaattagtatactgtgatttacttgggctaatataaatgtaaaaccctttaagctagaccagctgtaattatattcccaaagatttgatttttatcattatttacagctaataagacatttatgatctctttttggttgtctctgttgaagcattgttggcaatgctttcctgacttgaagttctcatgtgtgttgaaatcgaattaggaaaatgagtaagtaaataacttatcctaagagtataatctctcctttgtgacataaattagaaatccattcacatctgtggaataattcccaggtttgcgactacacaatctgatatgcacaagcaaacatgccaatcttttctcagtctaggagaatttggtcactttctacttgaacaaaacaagctatatgtgcttttaaatagatgtatcattttctcaaaattggattataaagagctgatctgagctgcaatcagatggataattaaacagcaaaggtaagaggcttctgactgcccatgtttacagtgttaattgaaaaaataaaaatatgatttttaatcctaaaggtaatttgaccaatgcacatgtacaatgatgtaaggttctctcactttccattttaatctcaggattgtggaggcatttgaacctagctttctcacagagaatggaagaagtttgactggagaaatctggccacattttacgtttttctggggtgtgtatagttgaatgaaaacatgaagatgctacttttaaacaattttttaattttgttttttcttccttcagctatgatgctttattgtctcagatctgtttaatcacctggaatactttttcgagtgatttttaaaatggcaagaaatgttcccttttccataatgtagctgttgcctctgaaatgccataggtgtttgcattttttaaatcctcatttgtggcagttattacgttttgcttcatgttatggtaatttggcatgcaaacatatcttttgtaccaaattttaaactctttgaggacagggttcatatcattgtcttctttaccctgggcttttcactgggttggtgaaatgtttgtggaatcggtgaatgaagataagacatacattgtcttctgagagtgggcagacatgtggcgggctattgctggataatgtgctcataatatcctgcagattaatttggttctttgatggaaaatgaagtgaaaacatgcatctgcagtccaaccttttcccaatgttattcaaaatgtaattcaatgtgatcaattacattgaaaataattgagaaatgagatgacacttaaattagttgaagacaattgtggattttgcccttggttctttggataagtaaacttttagtgttttctcagagatttacaaaattccaggggctgtgtattcttgcctataggacatccaaatcctgaggcttttcttcttatcatttctcatttaactgcttattaattctttccaagagaaggaataagaaacatgaatttttgctgttaattgaaccatcccttaaaactgtttggactgtcttttgggctattgagaaaaactatttggtcacttttcctgtttttttgagagtccaggtagaagaggtctttattattgtcattacatagttcataataatatttctgtttcacttttacgtagcataacttttcaacaaacctggcaaaacatcatccaggcattctggtcagtaaagatcctgtatcagttgtgctgtaagacattattgagccgataatgtaactggtccagtttcccccttttgtctctgtagagagttcggcagcatagcagagggtcccatggaagtagggataaaagggaattcttctttggcttttaaaaatctctcaactccattcaaacttctgcaagttttcctccttgggagatatggagtggttccaacatccttaatatcagttgccttttggtcaaattccacctttaatcccttctaagaatgggaaaataaagacatctattatgacgtcctaaaggcctgtagttattgagagagcggccaagactagaattataacttgggcctctgctattatgaatatattgcttgctgtgaactcacttggagtaaacttgtgttattatagaagtagcaaagaggccaaaaaagagacaggggcaaaaagacatgatcatcacaaagaaaagataaatgtttgagctgatggatatcccaattttcctgacttgatcattatacattgtgtacaggtattaaaatatcacatgtacctcccaaatatgtacaactattacatgtcaataaaaacagtttaaaaagtgatcaaaaacagtagcagaaatatattccttatgtaattttcatcgcatttgagcatctaggatttttgacaagacactgggcttccgtctaccatagggtgcttaggaggcctagtgatctccagaactgtggggtgtcagttcaagagtctgctccaagaatacattaagtgcttacttaatgcagagcactatctttaatgctttgaagattataagttctatttttgacccatcttctatgttgggccatttatttttatgatttttgcttctgctttgtcatttatatgtaggcgacagtaatagtaatggcctggtaaccttacagggaactgcaggttgatggtggggaagcatcttattctaatatacccatataaagacataaagatagcatttatatatttgtagtcaaatcattggttcatcctattttctgcagttgaagatagatatcaccatgtatatggccaattatctttatccagttcaatttggccaggtcaatgaaacttgtatttatgtcatactcttgtgtcatgggagatagaagaagtataatagtggccctaatttacttttggtaaaattgaggttaagtgattttcccaaatttattttgatataaagtaaattgcagatacaagttttttggtctctaaccttgtgttatttaattgttccacaaagaaatgctgcatattaaaattatggttttaaatggctcactcagcccttttgtccctcccttctccaagtaaaacaactaacccctatttttcagtttgttgtgaattcagtttgtccaaactaggctggggataggttaattaaataattatatagtgattaacatggggttagaatttatgtcagattggggcaaaaccaccttttgaatacctagaagatagtgaaatgtacttaatactaacattgtcatgaatatcaatcacaggtttagaagtcttttgatatatatgagctaaatatggggttgaatccccaccaatcatatcttaacagatttttttaaaaaggtaagtatctgaatcagctgctttattttatttgtctctttctcataaaaatgacaataaaattatggtatgtgaacttctgattatttagattccagttaaacaggattttactttagtttctttttttttttttactgaaaaaaaattttattgacttgttttttggtgtatatagttctatatattttaacacatgtatacattcatataaccatcaccacaatcatatgaaaactcttttataaaccctcaaactcccacatatgacttctttttttttctttttatttatttattattatcatactttaagttttagggtacatgtgcacaatgtgcaggttagttacatatgtatacataccatttgacgcagccatcccgtcactgggtatatacccaaaggactacaaatcatactgccataaagccaggagaatttcttgagcccaggagtttaagaccaagcttggcaatatagcaagagcttatccctaattttattttttattttatttattttttattttatttattattattatactttaagttttagggtacatgtgcacaatgtgcaggttagttacatatgtatacatgtgccatgctggtgcgctgcacccactaactcgtcatctagcattaggtatatctcccagtgctatccctcccccctccccccaccccacaacagtccccagagtgtgatgttccccttcctgtgtccatgtgttctcattgttcaattcccacctatgagtgagaatatgcggtgtttggttttttgttcttgcgatagtttactgagaatgatgatttccaattattatgaagagagagaataatggtttctcacttttcaattccatttagaaggaggttgtttctttcagaacaccaaatgaagctttctcagtggccatcctataggacctttgcacttgaatctctggtttctgaatttgggacattttaaaatcctaagatttttccaggtgatctttaaaaatgggatctagggagattttagcaaattaatggtttctgtgtttaactcttttaaaacatattttcatgatcgtgtgtgtgtgtgtgtgtgtgtgtgtgtgcgngggcagttgggggggtgggtgaagggggatatggggagaacaaacaataaccaaagaaacaatagtggaacttaaaaatattttctactaacttatttgctaataattattcaggcagctttatgaaagctctttggaaattctagaagtgtttccatttcaggcttaatatatttggatcataaataaatatcagataccttttggaggcattagaaactaaacattatgcaaaggctaccctctgttgcgtcaggagcttgaattgttttcattaaaatatctgctatgaaagcactgagattagatgggatgctatcaaatgtcagagatttgtattcttggtagaaactgagatttcattttccttcatcccattctgatgctggcttccctgaagcaacactcctgttccagatttgtatgcttgaggtaagtcagaaaaggaatttcggtgaggcatgagtttgttgatgaaacgtgggggaaaaccaaatggacatcttcagaatgaaagtgtacgtctttgtctgtctgaatgtgtgagaaagaagaacactgaacacagtctaaacctcctgctggtgtgattattgagtagtgttgatggccaaaatatgaatgaaggtttttctgttgcaaaatgctttatgttatgtgcagggcagacatctgtgtgcctgccttaaatttatgaactaataacattctgttccaagaaatcctgtcaggtctttaacggtaccattttgttctgagttattctggtaaatgaatgattttgcttttaagtaattattttttgaatttttaaatataaagtcacatatggtttaatgtatggagaggatgcctttatcatcaatgaaaactttaagaattgactgattgcattttattttaacaaaatatcattcattattttcttctatttggaacagatgtaaatgttccaatctattttggattcaaatgaattttgaatcaaatagatttaaaatgaatctattttgaatcaacaaaatagattcaagcaagttttatgagtgagattacagatgaatgataataagcaaaatcatgagaaaacccaacccaaataattgagttagactatactataaacaaagtaaatttaaaaacatatatcctcaaagaactgtggccagtaagatagatactctctgaggctaccctcctagtatagtaacggtaattctgctgaaaccaattaggcactgttgaaagcaacttctcgctgccgatgaagggactggatcctgtagcttggtgtccttgtcaagtcctcagtgtgtactcagcttgcccctgctaatacacactggtcttaaataaaacagagtggcaaatatttagagtgagttttatgtgtctttgggatttttccttccccgccattggtaaatagcacgtttcctctgcagatctgtgacctttgagataacttcccttgttaaacacacactgatttgtgtgggtatttgttttctttcttttttttttcaaaagctattccttcttttctactttatattcagttgctttcaacacagagtaaagtcttctgatgaatctcttgtctgtagttttgaaaggaggggagaagcaaaggaattagcaatcacaaagataaacctgcaaaggcaaactaagtagaaacatgtttttccgttgcaaattatgcttaactactataggctgtaatccctatgctgacatatctcagaataaaatgtaagttgcttgagatgctattctgaagcatgtgatatggttttattgattgataaatttatccatatgatgatagttgtagattttcagaggccccatatggaccatttgaaatgaaaatgttatattggcaatggatgagaacatgccacttgccctgctccatacaaactttgattcctagcaatcagcacatgttagagagctggaggccacggtatggtgtgcaagtgctcctgtgctgaagtgacaccagaacaatcaccacattgccatcaggccgtccatctgaggtagggttttccttcttgtttcaatctttatcattcctggagaatttgccaaggcccccagggcagtgctgaggcctccagcgccccctacaaatctctttttctgtcccttcaacattttcaggtctaactacctgtagttttcctctctaatttctgggccaaagcttggcagggggcaggcgcagaattaggttgaagaggccagtatgagcaggcataccaaggtccattgtgctataccagaggtgttacattagactaatgaagggattatagaaacttagctctccatctgaattctcttattaacacatcactgtgaatcagcctgctgctttcggtgttgtgtattttttccctttgttacttctgttactgctaacgatattggtatcatttgttgtatcaatgcaactgacttgtacttcaaattaatatctcaaccaacctagaatttcttgtctagctatggtaggtagtatggggtggtagtggtgttgtctcaggctagtatatgataatatgattttgaagtctgttttcccccccatttaacgaactagtgtgaacatctatccatgccttttaaacacttttctccaagataattttttatagttttttaatggttaaataacattaacttagccaatgaaatttaaaatattttgctactgtaaaaattattgtgtatctcctggtagttaaatcaggattatttccttaggatgcagagcttgtatgttaaggagtatagttattcataaaggtttgatttttttggccaaattgctctccagaaagtttttttccccttcagtttattctcctaccagcagtgcatgagagggcacattttcccgtatcttaagtagtgttgttttctaaaaatgttgccaatctgatatggggaaaatggcatttcactgtggtttttctgtgtttgttaagtcactagtgaggttgggtagttttatcctttgcaaattgcctatcaatgttccttacttatttttcttttgagatgcttattttccaattaattttactgacaatttttatatagtacagatagtaatccatgtgtctataggttgtttataatgtaaatatttttttccaagtttcttagtcactttttgactttttcccttgggtatatttttacatgagaagtttttgtgcatgtgattgagtcttttttaattgtggtaagaacatttaacatgagacttgccctttaaaatgtgtttatgtctataatacagtattattaactatgggcataatgttgcccagcaaatctctaggacttaatcattttacataactggaactttataccctctgaatagcaaatccccatttcccccttccccagcccctgggcagtggttgagtctttgatgttttccttttaaagtttctgcctttggagttagtttagaaatgacttcatcatcccaagatcacacacacttttcctacattttcttccagtttctttattttacatgcaaatcttaatccatctggaatttattttgttgtataggagtgcaagaatttaactttatatttttctcagatagttttccacttgccagtggaataatgatttgttgaataatctatcctttgctttttaagttttaccttgaaaaaacataatataaaattttggatctagttttttaatataattcattgatttctctttttgttggacagcataacattgttttaattactgtaatgcagttaaacatctgatagcttgaatcattcttatctttttcaaacatttcttggcagtttctttcatcatctcctgaccagatggtcgtcataatgtcttaattgctcattctaccattggtctcacttgcttctaatccattcacaacaaagttggctgaattgttgttctaaaacacaaattggatcacgttacgccctgcttgttgtgtatacatacttccagctatttttatcaactaaaaatgagccctttgcctataacaagattttaacctgaagtccaagcaatttctgaacttcagagtgtttgtagacaccatttcggtgattttttttttttttttctgagtagaggattgatagcatcatagattttgaaagagccatgactccaaagcattaataacctctgtgccacaggaagaaagtcagaccccccagaacggcttgtcagtagcaggtcctcccctggttgacatttctttcttacctgcctgccctctccctgaccactcttccacatccccacccttcccctcctggactgcttgcaattgtctatccagtctgctgtttcacaccccagtgcctttttacatgttattccttctgccaaagtgttctcccacacatacctcgcccatctggaaaatggttccttgtccttcaaacaacaatcaaagagcctcctcctctatgaaactttgtctgatccccttaagcaatgctgatctctctcctttatttttaaccactgtacttaatctgtattttaccgtgactcttctactcttcctcctctactggtactataatatctttgggaataaggactgtgtttttgtaaccacagagcccactgcctggcatagcataggcactcagtgaatgcttgatgaacagaagaatggatgcaaacaatgaatgtatggcaggacatagccctggtgaaatcactggcaggggcttgtgtgaagtaactgcataagaaaaaaacagcatgctgttagaggtgaagggaccagctttgagtttaacagaagtaaggacagaatgggtgaagccataatgtcaactttgaaatatcaccatttattaagaaaccacatttgaagttctaggatccttaaatgaaggcgcttttcaccaaatacttttctaaatttcctggggtgtttataacatggaggacctatttcctgagctaccagagtcctaacacatacctaattatgagttggtcaccaagagttatcagtaatcacaagtaatgaaagcatggctttgggtgagtgggtgggtagggtgggtgaggtgggatatgccatgttttggaccaaagctgtccacattgatgtgtagccattgttttcatgattctagcacccagtggatgttgagtaaatattttgtgagtaattgaatgctgagtgtgtagctgggggtatgacagccagctaactgtcatgtctactttctcagctctctgagatggcaatgctaattttgctggagaaagtagcatcactgttttacttggttccctctcttcatactgcctaattttagctagttcttattattacttgctttgtttacttcttggattctttatcgcattacctgtggtgtcacccactgtcttactctgggcaaatgaaccttgtttttttgagaatgttaagttcatctgacataagccgctcaatttcactcctcaaattcttctacatcagcattcttttctctaccctggggaaaaagaacctcctcatttaagtgtgctttctcttcttcttaaatattgcctaagcaactttttaacttttaatctctcattgtccatttacctctttctttgtttgcagacatcattagaatctccatccttgaaacaactcaataaacaaaaattttgcttgactttactagttgaataccttaacgttcacttttctttttacctccaaacttcttgaatgacctatgaccactatctacaccttttcttcatacactgaggtctggaaatctttattacctggtttcttctctcagtctccaaattattaaaaagtcaatttctcagttttcatttttcttcacctcttgataacacttgaaaccattaaaattcccctttattttgaatgggctctttcttaatgtctatcacactcaactgtctatttgctcgtatctttctgttttattttctgtttcttccgtggtcctctttctgatgtcctgagagtggatattaagttgcaccatgtctgcagggatgacaccccaaccctaaccttcaagtcaggcctctttcctatgttcagatctactgtttctggaaagctctaccatctgccccacaaaagcttcaacattaatagaaattccgtataatttaaaacaaaattccacctatattttctttcaaataaatgtttaatttgaaatatttacattaatgatgcaaccatttttctatccacccaaacttgagacctaagaatgagttgtttgctgattcttctctcatagccaaccatttcaatgttctctgatttctactgttacccaggctttgctttacattcccacttttatggtgcttatctaaacccttacttttggcctttaatattgtattggctatttatttattattttattattatactttaatttctgggatacatgtgcagaacgtgcaggtttgttacataggtatacacgtgttgtggtggtttgctgcacctatcaaccgtcatctacattaggtatttcctctatccctcccctagtccccccaccccctgacaggccctggtgtgtgatggtcccctccctgtgtccatgtgttctcatcgttcaactcccacttatgagtgagaacacgtggtgtttggttttctgttcttatgttagtttgttgagaatgatggtgtccagcttcatccgtgtccctgaaaaggacatgaactcatccttttttatgaccgcatagtattccatggtatatatgtgccacattttctttatccagtctatcattgatgggcatttgggttggttccaagtctttgctattgtgaacagtgccacaataaacatacgcgtgcatgtgtctttatagcagcatgatttatagtcctttgggtatatacccagtaataggaatgctgggtcaaatggtgtatctggttctagatccttgagggatcaccacactgtcttccacaatgattgaactaatttacactcccaccaacagtgtaaaagcattcctatttctccacatccactccagcatctgctgtttcctgactttttaatgattgctattctaattggcatgagatggtatctcattgtggttttgatttgcgtttctctaatgaccagtgatgatgagcttttttttcatacgtttgcagggggcataaatgtcttcttttgagaagtgtctgttcatattcttcaccctctttttgatggggttgtttggtttctttcttgtaaatttgtttaagttccttgtagattctgaatattagtcctttgtcagatggatagattgcaaaaattttctcccactctgtagggtgcctgttcactctgatgatagtttcttttgctgtgcagaagctctttagtttaattagatcccatttgtctattttggcttttgttgccattgcttttggtgttttagtcatgaaatctttgcccatgcctatatcctcaatggtattgcctaggttttcttctaggctttttatggttttaggtcttacgtgtaggtcttcaatccattttgaattaatttttgataaggggtaaggaaggggtccagtttcagttttctgcttatggctagccagttttcccaacaccatttattaaatagggaatcctttccccattgcttgtttttgtcaggtttgtcaaagatcagatggttgtagatgtgtggtgttatttctgagcctctgttctgttccattggtctatatatctgttttggtgccagtaccgtgctattttggttactgtagccttgtagtatagtttgaagtcaggtagcgtgatgcctccagtttgttctttttgcttaggattgtcttggctatacaggctcttttttggttccataaagatgcttttcctggctttagttgtttcttctctaggatattctttacatcgcaaccagaataagtcatcaaaggtccaattatgccacattcttgctcaaagatcttcaatgaatcttgatttctatgtgataatggttaatttcctacatgattaacatgtactctgaagctagactgcccggattttgatcctggtcccactacttcctagttttgtaaccttggaaaaattattcaactcctttgtgctttagttgcctcggtgaaaaatggggataatcatagtgctgccttatagggttgttgtaataattaaatgattatcctgcacatagtaaacagtcaatgaatttatgctattattattagtctgctatttgtgggctttcatattttgtctcaaatccaaccttctctttactcactatttctaaacacattgtgcatttttcaatatatatgcatttcaatatctatcttttgcttcctctgcctgtaatacccttttctacgccctatctctcctgtgtctttagaaattctatcagttcttcaaatgaacctcaaatagacttcctccacaatccttcacctatcataccaggattgtttatgtttctgaaatttcacagcctatcttatacttttcctgtttacttgattcatgttggcttagtttaattacacacgaagaaatcttgtgttgcctgatggactgtaaactccttgaaaacagggtttgtgttcattttttttgtattctaaagtaacaaggaaagttctccaaacataaatgtaataggtatttgttgaatgaatatagaaggaagggtgtaggttttggataagaaatcatcattatcaaactagtcaaaaatgacaagagtattgttttggatgcataagtatagaattagtacctctcactcatcccccactaagacgtttttgtcgttagcttgctgctaactgggctctggctgttacctcgcaaagactctgaagtaggaaagagcttggcacatttagaaactcacagatcatcaatgctgtagtgaggtgaaggagggagaaagtaccatgggttgaagttagagagttggagagagataggataggtcactagaactttcaggccaagttatgcagtttagggttttttttttttttgttttgtttttaaacaatggaaagcctttgaagggttttaagctggggaataaaaagataatactttacttttaaaattgcacccaggatggatggaagacagagagtgggaagatgagtgaaagcagagaaaacagttgggcactcttgtaggtgagagactgcatggccggggctcaactggcaacagtggagatggagagaggtgggtggaattgagatttattttgaaagtagaatggacaggatttgctgaagaaatgttagggaaaagaaagaaagcaatttgatatgatgtctcagtttctcactcaaacatctacgtggatgttgtggccatatttcttatttaacttatggatgaaagaaggtttcatatagcagataatttccaacaattcttaggcatcaatttacctgacaatagaaaactctgatgccatttgggatagaatgaattgttcctatatgacttccagagactgagtcattgtgggtgcttgtcatgcagtactcactgaggtgtaggaggatagcttcatggagaagatatatcttgaggtggatctagaatgaatatcaagctaaatttaaaattattaaggatggaatgaagtttatattcattatccacagtccatttgtatcaattttctgggatgtctattatcctgtaaaaaacatgtatttccgcagttataagagctttgatattggtgtgaaaacaatggtccctaattaagccataaggtattttgggaatttaaacaaatgtttggtggttatcaactgggaacttctggagaggtgaaatattgtatcggggacgcattgttctttttaaaggccacacggtgttctacttatatgtcatatcatgtacatagccagttccttcctggtggacatttaggttgtctcaaccttttcctatctccaacagtgcatgcttgtgcaagtatatccgtaggacaaaatcttaaggatagaattattagataaaagcagttaccaaatttaccaatcttcctttccagaagattgtctgggaatgactgcttttcttaccaccctaccaacacaggtgctaatctcataggaaaaaaaatgctactttgttttaattttaattcatgtttcttttgtcaggagtacaatcaagcaccttcctcctattaatatgtttatttcctcttctcacttttaaccattcttcaacctctacaattatgagaaagtaatgactgtcaaaaaaaaaattgctcattttttctgacatctttcaaggccctgaatagacgtcctaatttccaggtctgtgtagactgacttgggttactcaggtaatggcctctcttctgttgatgaacacacgtattgaagcatatatatgccaggctcagtactagacacaaggggtacagtcaatgaacaaaatacacacaatattctaccctcatagagcttacattttaaagggggaagcatacaaaaaataaattagctaaaaatataaatatcaagtggtaatagtaccacacagaagaataaagcagagtaagggtttagatggtgaagataggagagctgctcttttacatgaggttaacaggaaaggcatttccaagtacttctccctgcttctttctcatctgtgtgctctagttttactctccctcccttgtttgatccctattattacttgcaagtgtaaattccctaatgcagaacatggttagcatttggttaatggctttcccgtaataattgcattaaaatgatttctctccactatgaattatctgacatgtcagaacagacgaatgctatctaaaggctttttaaaatctgttaaatttatagggcatattccagccctcaccaagggtcacttcactccattctcagatagtgcccactgtcctgcatttgcctgctgtcaatcacaaaagagatggcttcttaatgaggctggtttatgacttttttccttaagacaaagtcagtcttcttttgcaaaagttgttctaatgaaggaaagtagaaataaaaattcatcatagcttctatggccagacataaaatgtctacagcaggattgatatggaaacataagcttttattaatttgtttatctggatgcttctgaagctagaaagaaagactttcaccatggaagcactggcaactgaatttccataatggattcaaagatctaaagaatatcctcaatttacatattctttctgaatttatgttcaaagaaagggtattaatataaacataaagtaaaataagacaaagcccaagtgtattaagactattcaaggcctgccatgcaaattgcagtggaaaagtctaccagtaggttattgggaaacagagagaaacttggagtccaaagataggagaggatacccaccactaactttcaatgaaaccacaagctggccacttagcttttcttgtgctgtagagtcaaatgtgaaacaataggctttatttatttaatactttgtataaggcactttgctcagtacattatatattgtctcatcctcatagtgagcctgaagggtagtaatttcattgtaccttacagatgaataaacttagacttagagaccggtcaaatagcctgcccaaaacaaccagttaataaatggaattgggatttaaacttagatttgtctgattccaaagcttgtgcccaaccagtgtttattgagtaccttccaaagagccaagcaacagtttgaaataggttcacatatgttcaactatcacaacaaccagatagagtagatattctgttgaagatgaggaaatgatgtgggggagaaaaagtgattgtgtgggggagaaaaagtgattgtgttgaggtcacacatctagagtggtcgagtcagaatatgtgtgaactcaagacctctagctccaaacctatgaattttgtttttaaaacatgactatagtctattctctgtacaatgttcataatattttttctgccagttgcctgctccctttaggtaaagggataattagcagagattccttgcagaaaagtgtcaaatatcagcacttaaaaacagtgctgaattttcccgttatttagcccattacttcattgagcctaatttcatgcttctaaaaacagcataagttctgtgggtagtgttcagtatgcttcagtgaaccgaatgcatcctagtggcctgagaagactcctactgcttctaaacatgtatgaataatggttgccacctgcaagtagcttaggcagtgggcaatcatacttcaattctaaagggtgtggaagggatgagtattttctgtttgaagctcaagctagattaaatgaattcttgatcttaatctactttgaactctacttggaacacatcatgagttgttttggcttactattaatttttaaatacaaatacagtgctcttgtattgaaagcataggattttgtgtaggagaaaatttgaatgtcttgaaaacattcaaaggagagctcagggaaataaatgaaagctggtggatttctaaaaatctttattgaggattaatattagaaacttgctgtacagtctaactgatttttgactttgtttctgggctattggtttcatataagacactattagtaatttcagaacaaataatatggccacatttcttgttcctaataaattggtactacttgggatcaatggatgattgttgtcattccccaaaagattttttaacagcagaaccagaaaactaattcacaaattatcaatattcagcactttgataaattcagatgaatttgcctacctaaagaaatgctacctgaaaagcttctctggcaggcttctccagagtttcattatctactctgaacttttgtttacatagcaatcatttctgctgtgttccttttccctactagccttggtaggcttcttagctgaattgtcctgaaacctataaaccagccctggaggctctgaaaaattaaagatctgtcttttttgttctgtttaataaatgttagcttaagaaagtctgcaatggaagaacactcaacttgtcctaaatgattctctcatttattcaagttgcaaatagaaagaggtatttcccaatttgcaataaaatattggactttaatttctaaaaaaaaatcttgaaagctacatactccatagacttctaagcaaagagagtcaagagacattcatcttcttgaatcttcattaatcttcacgtcctaaataattctctcatttattcaagttgcaaatagaaagaggtattccccaattagaaataaaatattgggcttcagtttcaaaaaaaaatcttgaaagctacatgctccatagacttctaagcaaagagagtcaagagacaatcatcttcataactaacaccaattgtcataaagcttccaaatgtaaacctaaactttttgttaggagtaaaaataaaaaagccaaacaaatgaaaagctgtgaactttctaaaacatcttaaagattctctggaaatttaaacatttaagttatatgttaagttgtgtctatcaagcaggtactttagaaaaagggaagatttaaacaatttaaatatatgctctagttgtttgatttaaaatgctttttgtgccaaagaaattcaggatagagatttagtaatcagagttgaaaaatgcataacacattgttctagtaattcccatcattcaaaaggaaccatctgtactgaatattcttagatagtttttcaagttcggttttacattgcagacataaaggaactacttttgtatctcttagacaacaattctgttatagaagtttacaggctaatggcaaacacatctcataattgtccttccagtttcttgacccatgtttacttccctttaatttcatgccataagtcagtgctcttgacaaagtatactctgaacatatttataaatcattattttttccaagcagttaatctctaactccctttttcatttctgtatctccatcagcattttctttgcagggttcaatactcttaatttgacatacagacccatccctgagagcaagggagagagaggaaagccctggcctttctttttgtaccttgattttttccattcaaactcatcattgttggtgcattgaaatctggaggtttgagtgagagatggaatcagagagatttaggaatggattcagattctacaactaaaaaccattaggatgcctatgagctttgttttctgcataatatctgaattacaaattgtatttaacaagtaaaactaagttgtgtccgactaattgaaaaccactttggttaatgttacctctttttgtgtccatttaaatccattaaatctttcttacttttgcctttaaaattagagtaatctatacaattcatgctactgactctgccttttaaaacacacaaatattaaaaaaaaaagagacatgttctggtgtcttcccctcagcccagtgagatgtgttacacagtagtctttgttatcagcctttggtttctgataatttagaaagctttcaatccccatcacttatgaaagtctgtgaacaataatttttatttaaagatttcttacagtgccgaatcttacaaccatttataaattcatgtcatgttttcttaaagttacagaactcttttcaatttttaagccttaacctcttgtctgcatagcaaatcctatttattttttaaaaagctgaattcaagtgtcatctcttaaatgaagattcctgatcatgtcaatcaaagagagctttctcctctgaaatcttttttttttaaatattagtttcaggggcacatgtttaagtttgctctaatagataaatggtgtgttttgggggtttggtgtacatattatttcgtcacccaggtaatgagcatagtacccaatatgtagtcttctgatcatcaccttcctcctaccctccaccctcaaataggccccgctgtctgtccttctcttcgttgtgtccatgtaactcaatgtttagctcccaattataaatgagaacatgcagtatttggttttctgttcctgtgttagttctcttaggataatggcctccagccgcatacatgttgctgcaaaggacatgatctcattcttttttatggttgcatagtattccataatgtatatgtaccacattttctttattcagtctaatgttgttgaccattttggttgataccttgtctttgttattgtgaatagagctgcaatgaacatatgcatgtgtgtatcattatggtagaatgatttatattcctttgggtacatacccaataataggactgctgggtcaaatggtggttctgttttaagttcttcgagaaattgccaaactgctttccacagtggctggactaatttacattcccactagcagtgtataaatattcccttttctttgcagtatcaccaacaactgttactttttgacttcttaataatagccattctgactggtgtgagatgatatctcattgtggttttgatttgcatttccctaatgattagtgatgatgagtattttttcatatgcttgttggccgtgtaaatgtcttattttgaaaagtgtctttgcccactttttaatgggcttgtttgtttttttgcttgtcaatttgtctaagttccttatagattctggatattaaacctttgccagatgcacaatttgtaaatattttctcccatcctgtaggttgtctatttactttgttgatagtttcctttgctgtgcagaagctctttagtttaattaggtcccacttgtcaatttttgtttttgttgcaattgcttttggcatattcatcataaaatctttgccagggcctatgtttagaatggtatttcctaggttttcttcaatggtttttataattttacattttacatttaagtgtctaatccatcttgagttgatttttgtatatgatctaaggaagctgtccagtttcagtctttggcatatgattagccagttgtcccagaaccatttatcgaatagggagtcctttccccattgtttgtttttgtcaactttgttgaagatcagatggttgtaagtgtgtgggtttatatctgggctccctattctgttccagtggtctatgtatctatttttgtacctataccatgctgtcttggttactgtagcattgaagtatagtttgaagttaagtgatgtgattcctccagctttattcttttttgcttagaattgctttggccatttgggctctttttgggttgcatatgaattttagaatagttttttctagttctgtaaagaatatcattgttcatttgacaggaatagcattgcatatgtaaattgataaattcctgaaaacattcaacctctcgagactgaaccaggaagaaatttaaaccctgatcagaccaatagcaagttccaaaattgaatcagtaataaaaaggctaccagccagaaaaagccttggaccacacagattcacagcaaaattctancagacatataaagtagagctggtaccattcctactgaaactattccaaaaaattgaggaggaggaactcttccctaactcattctatgaggccagcatcatcctggcaaagacaaagcaaagacataacaacaacgtaaaaacttcagaccaatatccttgatgaacatagatgcaaaaatccttaacaaaatactagcaaactgaatccagcagcacataaaaaaaactaatcccctctccctctccctctccctctccctctccttctccccacggtctccgtctccctctctttccacggtctccctctgatgccgagctgaagctggactgtactgctgccacctcggctcactgcaacctccctgcctgattctcctgcctcagcctgcgagtgcctgcgattgcaggcctgcgccgccacacctgacaggttttcgtatttttttggtggagacggggtttcgctgtgttggccgggctggtctccagctcctaacngcgagtgatctgcccagcctcggcctcccgaggtgctgggattgcagatggagtctggttcactcagtgctcagtggtgcccaggctggagtgcagcggtgtgatctcggctcgctacaacctccacctcccagccgcctgccttggcctcccaaagtgtcgagattgcagcctctgcccggctgccaccccgtctgggaagtgaggagcgtctctgcctggccgcccatcgtctgggacgtgaggagcccctctgcctggctgcccactctggaaagtgaggagcgtctctgcccggccnccatcccatctaggaagtgaggagcgcctcttcccgacctccatcccatctaggaagtgaggagcgtctctgcccggccgcccatcgtctgagatgtggggagagcctctgccccgccgccccgtctgggatgtgaggagcgcctctacccggccgcgaacccgtctgggaggtgaggagcgtctctgcccggccgccccatctgagaagtgaggagaccctctgcctggcaaccgccccgtctgagaagtgaggagcccctccgcccggcagctgccccgtctgagaagtgaggagcccctccgcctggcagccaccccgtctgggaagtgaggagcgtctccgcccagcagccaccctgtctgggagggaggtgggggggtcagccccccgcccggccagccaccccatccgggagggaggggcgcctctgcccggccgcccctactgggaagtgaggagcccctctgcccggccaccaccccatctgggaggtgtacccaacagctcattgagaacgggccatgatgacaatggcggttttgtggaatagaaaggggggaaaggtggggaaaagattgagaaatcggatggttgctgtgtctgtgtagaaagaggtagacatgggagacttttcattttgttctgtactaagaaaaattcttctgccttgggatcctgttgatctgtgaccttacccccaaccctgtgctctctgaaacatgtgctgtgtccactcagggttaaatggattaagggcggtgcaagatgtgctttgttaaacagatgcttgaaggcggcatgctcgttaagagtcatcaccactccctaatctcaagtacccagggacgcaaacactgtggaaggccgcagggacctctgcctaggaaaaccagagacctttgttcacttgtttatctgctgaccttccctccattattgtcctatgaccctgccaaatccccctctgcgagaaacacccaagaatgatcaataaaaaaaaaaaaacaaacaaacaaaaaacaaaacacaaacaaaaaagaaaggtttgagctaagaacttgcaggagacaaggaaattagtcaagcagaaggatatctgggggaatggcatgcgaggcagaagggaaagctagggtcgaggccctcagggaaagaagcaaggccaaggggctggagtagagggaggaagaggggaagtagtggaagatgagactagctttactactgattatgatgtaagaatagtggccagtttcctttccaacttgggcccggcagaatggctcctgcaaagaagggtgatgagaagaagaagggtcattcgccatcaacgagatggtgacccgagaatatcccatcaacattcataagtgcattcatggagtgggcttcaagaagcgtgcccctcaggcactcaaagagctccggaaacttgccctgaaggagatgggaactccagatgcacactttgataccaggctcaacaaagctgtctgggccaaaggaataagcaacgtctcatactgtatccatgttcggttgtccagaaaatgtaatgaagataaagatttaccaaacaagctctatactttggttgcctacgtacctgttaccactttaaaaaaatctacagtcggtgtgaatgtgaactaactgctaatcatcaaatataccaaataaagttataaaattgtttaaaaaaaaaaacaaaaaaaaaaaaactaatccaccaccattgagcaggctttatccctaggatgcaagactgatttcaacatatgcaaatcaataaatgtgattcaccacatgaacggaataaaaacaaaaaacacatgatcatctcaatagatgcagaaaaggcttttgataaaattcagcaaccttcatgttaaaaaccttcaaaaaactaggcattgaaggacatacctcaaaatagtaagccatccacaacaaaacccacagccaacatcacactgaatgggcaaaagctgggagtattcctcttgagaactggaacaagacaaggatgcccactctcactgctcctatttaacatagtattggaagtcctagccagagcaataagggaagagaaagaaataagaggcatccaaataggaagagagaaaatcaaactacctctgtcaaactacctagaaaaccccatagttttgcccaaaagctcctagataacttcagcaaagtttctggatacaaaaatcagtagcatttctctacaccgataatgtccaagctgagtgccaaatcaagagcataatcctattcacaatagccacaaaaaataacatatctagaaatatagctaaccagtgaagtgaaagagctctccaatgagaattacaaaacactgctgaaagaaatcagagatgacataaacaaatggaaaaacattccatgctcatggataggaagaatctcctctgaaatcttatagctagagaaaccataacatttatcatacaaatttggcattttttgagggtgaatgaatgggagaactattagtagtcacattgggacaataatcataaactggaactatcctgtgtaaactggatgtattgtcacccaagttattgccttttgggatcctaactgttagtatcaaggactttggaccgaagtctgtctggttccaaattctggttctcagcatgactttgagtagattattatatcctttgccattcacttattctttttatagcttcttactaagcttgtattagatgtgtgcaaattgtaaggcattggtaacacaatggtaaataatatttatggtttgtgctgtcatgaagcttacatccaactttatctacaaagtggggccaaggatacctacattatgaaaattctttatatcatcgtgagaagtaaatactatttgtgaagcatttagtaggattttcagtatataggaagtcctcagtgataactataattttatttgtatttttcatatgccattttgttgcatagtcgcatgtataattgtaaggtttttgagagtaggaggcaaggcttatgaacatttacataccttcaggcatcagtatagtagcctctcattgcatgaatgaatttattgagtgaattccactaaacaccaggtatcaaactttttttttttctcattatctcttctgttttttgttcctctgttgtttctttcctgctcttttcagagcatttgaatattttttagtgtgccattttattttttctattggcttttagttatacccccttatctctctgtttatcatttatcttcctttttaatttaattttcttgattgctcaagggctaaaaatatgcagcccctatgcattagaatctattcatactcagtattgtacctctccacatttcacacttaacatttgacaaatgtagtaaacttacaacattttatttcaatttagtcatcctctttcttttattttctttttatttttttgagacagggtcttgctctcacccaggctggagtgcaatggcacaatcatggcttactgtagcctcaaactctggggctcaagcagtcctcctgcctcggcctcctgagtagctgggactcagtcatgtgccaccacacctagttaattttttatttttatttttagtagacatgaagtctcactatattgcccaggctggtctcaaactcctgggctcaaatgatcctccctgctctgcctcccaaagtgctgggatcacaggcatgagccacaacacctggcctcatctccctttctttgtatggttattgtcatattcattattttaacatgtcataaccccaaccttagagtgttttcacttttgccttaaatagtagtctttaaggaaattctaagaaagaaaacatactactttatatttagtaatttacttaacatttccagtgctctttttctttcttactgtagatctgaatttccatctggtatcagttatcttcaactttttgtatttcttatagtgtaggtctgctggtgattaattttctcagcttttatttatctgaaagtgcctttattttcttcccatttttgaagaatatttttgttggttgtagagttctgagttaacagctttgttttcgtttttcctttcagcgatttaaaaattccatgccattggggttttcagtccccactgtttctcataagcccatgatcattcttatccttgttcaactgtacgtaatgtgtgtctttcctctggatgcccttaatatttcctctttatcttggatgtgctgcagttttattacaatgtgcctgggtgtggttttctttatatttattcttcttggggtttgctaaacttcttggatctgtttgatcgttttgaaaagttttcagctgttattccttcaaatatttttttctggcccattctcactcgcttttctttctaggattccaattacatttacgttaagactatttggtattgtcctacctattcctgaatcttagttcatcttcctgattattttccccactcttcctttctaagattaaataatttctactgatctgttttaggttctcttttcttctgccatctctaatcagctattcagacctgtccactaaattgttcatttttatttttttttagttctagaattttcatttggttattttctctgcctagactcctctattcactccttgagatcatatttcctgtcattctttggacatatatatttaaaattctttaacatatttacaaaagctgctttagattctttgtttggacatatctgggtaattttgagatttgtttgtatttactgcttttttgcttgcctatgtatcatattttcatttttttaaattatgctttaagttctagggtacatgcgcacagcgtgcaggtttgttacatatgtatacatgtgccatgttggtttgcttcacccatcaactcatcatttacattaggtatctctcctaatgctatccatcccccaccccccacacccccccaacaggccctggtgtgtgatgttcgccaccctgtgtccaagtgttctcattgttcaattcccacctatgagtgagaacatgtggtatttggttttctgtcattgtgatagtttgctgagaatgatggtttccagcttcatccatgtccctgaaaaggacatgaactcatcctttttcatggctacatagtattccatggtatatatgtgccacattttcttaatccagcctatcaatgatggacatttgggttggttccaagtctttgctattgtgaatagtgccgcaatagacatacgtgtgcatgtctttatagtagaatgatttataatcctttgggtatatacccagtaatgggatggctgggtcaaatggtatttctagttccagatccttgaggaaacgccacactgtcttccacaatggttgaactaatttacactcccaccaagtgtaaaggcattcctatttctccacatcctctccagcatctgttgtttcctgactttttaataattgccattctaactggtgtgagatgatatctcattgtggttttgatttgcatttctctgatgaccagtgatgatgagcattttttcatgtgtctgttggctgcataaatgtcttcttttgagaagtgtctgttcatatccttcgcccactttttgatggggttgtttgtttttttcttgtaaacttgtttaagttctttgtagattctggatactagcactttatcagatgggtagattgcaaaaattttctcccattctgtaggttgcctgttcactctgatggtagtttcttttgccatgccgaagctctttagtttgattagatactatttgtctatgttggcttttgttgccattgctttttggtgttttagtcatgaagtccttgcccatgcctgtgtcctgaatggtattgcctaggttttcttctagggtttttatggttttatgtctaacatttaagtctttaatccatcttgaattaatttttgtataaggtgtaaggaagggatccagtttcagctttctacatatggctagccagttttcccagcaccatttattaaatagggaatcctttccccatttcttgtttttgtcaggtttgtcaaagaccagatggttgtagatgtgtggtgttatttctgaggcctctgttctatttcttggtctatatctctgttttggtaccagtaccatgctgttttggttactgtagccttgtagtatagtttgaagtcaggtagcgtgatgcttccagctttcttctgttggcttaggattgtcttggcaacgtgggctcttttttggttccatatgaactttaaagtagttttttccatttctgtgaagaaagtcatcggtggcttgatggggatggcattgaatctataaattaccttgggcagtgtggccgttttcacaatattgattcttcccatccataagcatggaacgttcttccatttgtttgtgtcctcttttatttcgttgagcaatggtttgtagttcttcttgaagaggtccttcacatcccttgtaagttggattcctaggtattttattctctttgtagcaattgtgaatgagagttcactcatgatttggctctctatttgtctgttatttgtatatcagaatgcttgtgatttttgcacattgattttgtatcctgagacttcgctgaagttgcttatcagcttaaggagattttgggctgagatgatggggttttctaaatatacaatcatgtcatctgcaaacagggacagtttgacttcctcttttgctaattgaattccctttatttctttctcttgcctgattgccccagccagaacttccaacactaagttgcataggagtggtgagagagggcatccttgtcttgtgctggttttcaaagggaatgcttctagtttttgcccattcagtatgatattggctgtgggtttgtcaaaaattgctcttactatttggagatacattccatcattatgtagtttattgagagtttttagcatgaagggctatcgaattttgttgaaggccttttctgcatctattgagataatcatgtggtttttgtcattggttctgttgacgtgatggattatgtttattgatttgagcatgttgaaccagccttgcatccctgggatgaagctgacttgattgtggcagataaactttttgatgtgctgctggtttcagtttgccagtattttattgaggattttctcatcgatgttcatcagggataatggtctaaaattctctttttttgttgtgtctctgccaggctttggtatcagaatgatgctcataaaatgagttagggaggattccctctttttcttttgattggaatagtttcagaaggaatgttaccagctcctctttgtacctctggtagaattcagctgtgaatccatcgggtcctggactttttttggttgataggctattaattattgcctcaatttcagagcctgttattgatctattcaggaattcaacttcttcctggtttattcttgggagggtgtatgtgtccaggaatttatccatttcttctagattttctagtttatttgtgtagaggtgtttatagtattctctgatggtagtttgtatttctgtggatcagtggtgatatcacctttatcattttttattgcatctatttgattcttctctcttttttattagtcttgctagcagtctatttttttgatcttttcaaaaaaccaacttctggattcattgattttttgaagggttttttgtgtgtctctatctccttcagttctcctctgatcttagttatttcttgtcttctgctagcttttgaatttgtttgctcttgcttctctagttcttttaattgtgatgttagggtgtcgattttagatctttcctgctttctcttgtgtgcatttagtgctataaatttccctctacacagtgctttaaatgtgtcccagagattctggtatgttgtgtctttgttctcgttggtttcaaagaacatctttatttctgccttcatttcattatgtacccagtagtcattcaggagtaggttgttcagtttccatttagttgagcagttttgagtgagtttcttaatcctgagttctaatttgattgcattgtggtctgagagacagttttttgtaatttctgttcttttacatttgctgagtagtgctttacttccaattatgtggtcaattttagaataagtgtgatgtggtgctgagaagaatgtatattctgtagatttggggtggagagttctgtagatgtctattaggcccgcttgttgcggagctgagttcaagtcctggatttccttgttaaccttctctctggttgatcggtctaatattgacaatggggtgttaaagtgtcccattattattatgtgggaatctaagtctctttttaggtctctaaggacttgctttatgaatctggatgctcctgtattgggtacatatatatttaggttagttagatcttcttgttgaattatctctttaccattatgtaatgcctttctttgtctcttctgatctttgttggcttaaagtctgttttgtcagagaccaggattgcaacccctgcttctttttgctttccatttgcttggtagatcttcttacatccctttattttgaacctatatgtttctctgcatgtgagatgggtctcctgaatacagcacactgatgagtcttgactctttatccaatttgccagtctgtgtcttttaattggagcatttagcccatttacatttaaggttaatattgttatgtgtgaatttgatcctgtcattatgatgttagctggttattttgcccattagttgatgcagtttcttcatggtgtcgatggtctttacaatttggcatgtttttgcagtggctggtaccagttgttcctttccatgtttagtgcttccctcaggagctcttttagggcaggccttgtggtgacaaaatctctcagcatttgcttgtctgtaaaggattttatttctccttcacttacaaagcttagtttggctggatatgaaattctgggttgaaaatttttttctttaagaatgtcgaatattggcccccactcttttctgtcttataaggtttctgccgagagagctgctgtttgtctgatgggcttccctttgtggacaacccgacctttctctctggctgcccttaacattttttccttcatttcaaccttggtgaatctgaaaattatgtgtcttggggttgctcttcttgaggagtatctttgtgatgttctctgtatttcctgaatttgaatgttggtctgccttgctagtttggggaagttcttgtggataatatcctccagagtgttttccaacttggttccattctccccgtcactttcaggtacatcaatcagacgtagatttggtcttttcacatagtcccatatttcttggaggctttgtttgtttctttttactcttttttctctaaacttgtcttcttgctttatttcattcatttgatcttcagtcagtgatatcctttcttcgacttgatctaacaggctattgaagcttgtgcatgcatcacgaagttctcgtgccatggttttcagctccatcaggtcatttaaagtcttctctacactgtttattctaatttgccattcgtccaacattttttaaagattttcagcttccttcaatgggttagaacatgcccctttagcttggagaagtttgttattaccatccttctgaagcctacttctgtcaacttgtcaaagtcattctccgtccagctttgttccatagctcgtgaggagctgtgatcctttggaagagaagaggcactctggtttttagaatttttaaattttctgcactggtttctctccatctttttggttttatcaacctttggtctttcatgttggtgacctacagatggggttttggtgtggatgtcctttttgttgatgttgatgctattcctttctgtttgttagttttcctcctaacagtcaggtccctcagctgcaggtctgttggattttgctggaggtccactccagatcctatttgcctgggtatcaccagtggaggctacagaacagcaaatattgctgcctgatccttcctccataagcttcgtgctagaggggcacctgcctgtgtgagatgtctgtcagcccctactgggaggtgtctcccagttaagctatgtgggggtcagggacccacttgaggaggcagtctgtccgttctcaaagctcaaacgccatgctgggagaaccactgctctcttcagagctgtcagacagggatgtttaagtctgcagaagcttctgctgcctttttttcagctatgccctgcccacagaggtggagtctatagaggcagtaggctttgctgagctgtggtgggctctgcccagttccagcttcctggccactttgtttacctacttaagcctcagcaatggtgaacacccctccccccaccaggctgctgcctcgcaggtcaatctcagattgctctgctagcaatgagcaagtctccatgggtgtgggacctgctaagccaggcacaggagagaatctcctggtctgctggttgctaagacagtgggaaaagcgcagtatttgggcgggagtgtcctgtttgtcatggcttccctttgctagaaaagggaaatcccccaaccccttgtacttcccaggtgaggcgatgccccaccctgcgctggctcccgctccatgggctgcacccactgtccaatcagtcccaatgagatgaaccaagtacctcagttggaaatgcagaaatcacccatcttctgcatcgatgacgctgggaggtgcagactggagttgttcctatttggccatcttggaatggagatcttatttctttatctggtgattttttattgcatactggacattttggacaatgtgttatcatgcctctggattgtgttattttcttctgaagaattttgcttgttatcttagcatgctgttcaattggctgatcacgttgaacatgtttaagcatggttttaggctttgttagtccaaatctttgagaaatcccaggtgctttcccaacctattcaacctggcagtattcagtgttgatagaggatgtttttcttgatgataggctttgttttagactttactggagtcataggacttactttaggacatagtctttacttgtagagaggtaccaactttctgtttctcaggtagatcccaggggtgtcaaagtagtatttatttatgagctctctcaaacccataggacctgaactgcaatgatgtctagtactattcttcttccagcattacttgacctccactatttctgttctctcaacctgataacattttctctctgttaagcctccagtattctcactctgcaaatgtatggtggtgatctcagtcacagatttgtcccatgtctgggacaaatctctgcaaaacttctgagacttctctgtgttaaagtctttactctctaagactctgctttatagatgccagccatgccagctgcctcagactccagctctttttgtcatgtttaggaaaatatccttattcacagaggtggacattcgtgggcagagggatttcagttctggattggcttgttagccactgtttgaaaacggtttcctcatatattttacttagttttgtaagtattttctgtgagacagataatctgttactagttactctatcatagctggaagcagaaatatataggtatcaatttgatttgcaattgtttctagtttacaatgcattctgcctatcttaaaaaatttgtaattctaatcattttatttttgatcagggaatgtatttattgattcacatgaataaaattcaaaggctatagaagaatatgtagcaaaaaatctctcttctaatctagtagcctaattcttctcctcagaggtgatagatattaccagttctttttgttccctttcagacatattttagatatatatgaaatcctctccctcttcttattttcctcacataaatgatagcatgatgtgcatactttatatttttttgtgttttgtcttttttctacttaatgacatatcttggaggctatacatattaatatataaagaatttctacattcttttttgggctacatgatactcagttttatgaaataccatgaattatctcaccagattcctatttttactcatactttttggttattataaacaatgcttcatgaactactttgggtaaaccatttggtatatgccagtatatctgtaggatacattcataaaagtgcaattgctacctgaaaatgtatgcacatttgttacttagttaaatgttgccaaatttccctccagcagctgtgttagtggctgtagcctcgttaaaaatgtatgggaggaatgctgacatttttgttttacctgcagtatccattttctccatggtacatctacaaaattggcttctattttttattcttatgtttatcttaatcttttaataatctttccctgattaacttacaagtttcttgttataacaaataagggggctaagggggagggggatggttaatgaggaaaaaatagaaagaatgaataagacctactatttgatagcacaacagggtgactagagttagtaacttatttctacaattaaaaataaccgagagtgtaactggattgtttgtaacacaagtgataaatgcttgagggaatggatactccattctctatgatgtgattatttcacattgcatgtctctgtgtaaacatctcatgtaccccataaatatattatacctactatgtacccagaacaattaaaaataaaaaaatttaaagtacaaaaaaagacaaaaagagtcacacagaaaataaaggaaaatagtctatagaaggataaaaaacaaaacaaaaaaacaaataagataagcagcagcgatttatataaattagagttattattattactgtggttgctgtggttgattttcctaatattccagggcacgaatcagctgataatatccattttaaaagtgcaattttatttccattttagtcagtctgattttcaaattattctcccctttttgtgctttaaaaataggggtataacatatgctagcctgttcccaatttgaactcgtgtctttcaaatgcacagtctaactttattaattctgtatggaatcatgtcctgtgagctttctagcttttctttctttcttgttttttttcctttacctcacttgctcttctgaatttgaggagctaaagatatttgtgacaagacttagctactcaatgaacattccgaatcaatgttttcctgtggaaacagtgactctgatggaatcttctccacttcctggaacattaaattgtcactaggtaattcaggagtctctttttcaggttcttgtctgcagtatactgaaaagtgaattgtgacctcattgttatgaaatttggaagtgtttatctttaatgttagcttagagtgtttttttttccctctctcttgcattccctttaaaccctgaccatttaaacattatagacaaggacatttctcatgtgtttgtctttctctaaatctgttagtactttaaactgtgtggtcccaacacgatgttgtactatacttgtggaatcaacactcaaaagagcccattcagaagagttttttttcttcttcttggtaactgctttctaaaaaaaattcttctttatattctaaagctctaagcccccaagccccatcctcccatgttgagattcctgttgccacctgcctttgactcttctatgtcctcctgtcaaatacccttcctggcctattgttccaacttattataaaacactgtaactgaatggcttgaaaagatgttgcgaatgtagttgatttttcctctgagaaacaagtgtgttagcttctttggagaatgtattaactggtactactggcactactaagctctaggcttagaactgtgtgagggaaacaaaaaacagaacaaagatatgcagaagtctggtttttgccctccaggagtgcaatggttgtgagtgtaggatctgaactcaagcagacagatgtaggctggatgatcttgggtgaggtacactaaatctcagttctctcatccgtgatacaattgtactcatctcacagattaaacaagataaatctgtggggagaatccgccccagaattgagagaggctgttctctgggcacacttgctttatgtggtcttttcaattgctgtcaatcagtttttaaaatctggttgcccaaacaccattgtggctattaccatgactacttcatgttctggctgttctggcagtacaaatgagtctggacatctacttcaggtaaattggatgtttgattaattaataaccatgtaggccatttgtagatggaatcgcacagtgtgattagtcatggtagcatgaagactttaacaggccaatccctacatctcaatggctttatatattacatatttatttcttgttcgtatcacattacaatgtggattgggggtaaagtgggacacagcatgttccacaaagttattcagattcccaagctgtttttacctagttcattatcctctaaagccccagagtcttggatattaatttctctgaaggaagagtgtatgatagtgtgtccagaattggtgggctcttggtctcactgacttcaagaatgaagccgcggacgctcatggtgagtgttacagttcttaaaggcagtgtgtccagagtttgttccttctgatgttcggatgtgttcggagtttcctccttctggtgggttcgtggtcttgctggctcaggagtgaagctgcagaccttcgcggtgagtgttacagctcttaagtcagggtgtctggagttgttcgttcctcccagtgggtttgtggtctcgctggcttccggagtgaagctgcagacctttgcagtgagtgttacagctcataaagacagtgtggacccaaagagtgagcagcagcaagatttattgcaaagagtgaaaaaacaaagcttctacagtgtggaaggggaccccagcaggttgccactggtggctcaggcagcctgcttttattctcttatctggccccacccacatcctgctgattggtccattttacagagagctgattggtctgttttacagagagctgattggtctgttttgacagtgtgctgattggtgcatttacaatccttgagctagacacaaaagttctccatgtccacactagattagctagatacagagtgtcgattggtgtatttacaaaccctgagctagacacagagtgctgattggtgcatttacaaaccttgggctagatacagagtgctgattggtgcattcacaaaccctgagatagacacagggtgctgattggtgtgtttacaaaccttgagctacatacagagtgctgattggtgcatttacaatcccttagctagacataaagattctccaagtccccaccagactcaggagcccagatggcttcacccagtgggtcccgcaccgggcggcaggtggagattcctgccagtcccgcgccctacgcctgcactcctcagccctttggcagtggatgggactgggcgccctggagcagggggcagcgcttgtcagggaggctcgggctgcacaggagcccatggtgggggtgtggggagactcaggcgtggccgcactgcaggtcccgagccctgccccgtggggaggcaactaaggcctggtgagaaattgagtgcagcagctgctggcccaggtgctaagcccctcactgcccggggtggcggggccggcctgccgctcccagtgcgggcccaccaagcccacgcccaccggaactcgcactggccttcaagtgcctgccgcgcagccccggttcccgcctgcacctctccctccacacctccccgcaagctgagggcgccggctccggccttggccagccgagaaaggggctcccacagtgcaggggagggctgaagggctcctcaagcacggccagagtgggcgccaaggccaaggaggcgctgagagccagcaagggctgtgagggctgtcagcatgctgtcacctcttaataggtggtttggaggttttaggaaccaggtctggatggggtacatatgacttacattcacattctattggctagaacttgtctcatagcctgatcagatgcagagggtctaggaaataggtgctgaaagaagggaacccatgcacattaatgagtaccattgattgctccctttcagtggcactttaaaggtttggacttccagttgtctcacccaggttgagtgcaaccacttaggcattcctaccatgtgacaaggtactggcatctagcttgatgtgggtctgcccaatggcaaatgattaccctaagactcaaatttcatttcccttcttcctgtgtcttaaccaaggagagattttaaaacgtataccagagacgaagaggcactttgaatttgtccgggtaggtgcttcttggtttggggatgttatgaccttagataggtaagtgaaggctgtcatgtggaatgactcccagatttaatgtaattccattacaagtaggtttacataagaggcacaactttgtttcttggttattccttattaccatatttataacacttaaaagaaagagttcagaaaatagctaggattggtttactccagatacctggagtgttaaccagcaaactgctttgtagccttgtgtgtaccaacagaagtaggttgcatattctgtcttttctttctccttgaaagcaatactttgctgatctttaacttatatatgtcccttggaatgatgccagggagaatttttataataggtccaaattatagttgcctgtctttgtgtgtgtatgtatatttaactttttaatttgattttatttttaagtagctttatctctggatgggcaatgcatatcttaatagtgtgatcaaaaacagttaagataaaaaatcttaatagagttttatgacccataaaaatactcaataatatcaatttttgtttttatgactattatttgcattctctagggaggcagattaacacataaaaactacctaaagaatataaaaacaatgtatggataatatggcagaaatggtatataattggtataaagtacaaaaccaaggactgctagtgcacagaagctttggtttgtttatttgaggagattcgtcttagcatcggccctactgtgtatgacagacaaggactgttatcacagcatgtactaaggaatacatgaccccttctgcttaccttcgaaaggggagaaattgtatctgtcgagaaacttggtggaacaaacagaagtgcatgcaattaattgtaagacatagggcatcggttctgttttctattttagaactgtaaaaagtttgacaaagtgaacctgaactctgataaagcagcaagaaaaatctggaagtgttctttgggttaggagatgcttataactggttggatggaaatagtagttacattaagattatttgttactttgggatctgatgcagggctgaaacaacccaatgtaagtcaatgatactttcaccagattgaagtttctaagctgtttttccaaaaaaaaaaaaaaataaacgaaaaaagaaattcaaaattaaaacaaaccactcccaaattctcttacatccatggcattctgaatttataaggataggctttggcccttttagaatctggttttatgaaggtggaaggaatgacaaggcttagtgcaaaatattaaaagtaccttatgcccttttaccaagtgtgcaccactgcgttcctgagtctgtgtagtcttcccatctatttctcctttcgtttcttcctccttctccttcctccttcctcctctcatcttcagaaaatgaaaggctctggaagtctattgtgtgtgagtacctttgggaccaatgtaaaacatagagcaatatgcatgcaagggatgcttctccttcagattggaaaaaaagtggatttaaatgaaaacagacctgacaatatacctttttctgcctataggtttgatgaggtaatgttataaagtatattgctctctaaaaatcctgagggtttttgagtgaatgatgtaatgaaagtaagctacagtagtcagtaggaatataatctaggaagtatgtcctgggataaataaaactgttgatagcatgaacgttatgtgcttgtgagctcagctagtgaggggatgaaggagcttgcatttattaaatagcttagttaaatgaattatacatatattccatgacttcaactatataatgttgtagttaaagtcatcattttagaatcagactgaagtggatctaaatcctggtattatgacttaatattcacctagtcattagcaaatgactccacctctagcctagccttagtttccttatctataaaaagtatttgattaaaacctaccttaaggatttgttgtaagggttataggaaataatgctataggctttggcaaataaaaaacaatcagctggctgttattaccttacagtggttacatatttttaaataaccaaaataattgacataaaattaacagaaaaacttaacaaaatgatttagtaaataacttaagatcttggagtgcctcatagtcatcattggaaacataaggagtattgtacttttctagaaccaataacataattctgggtgatggaatccttttgctataagtatctatgtgaatacacaaaacatgcagggtttgaactaagcatcgaagaacgaggatgatttgagaaaaagttctgtctccttgggaataatacaaatcagtgatccagacatgcagaaaaaagacaaaaacaaggtggaatgtggtagaatactacactaaattatttgagactgcccaaatacctccagatggagtaaggctctctaaaaagatattgactggtttttctatctcttctggattgctctttcaagtgaatgtgtaaatatgtctataaaaacgatgcagtgttgggtaacggcaacaaaattattggtctcagtctcccttggctgttttttcccctaatttctttgtgttttagttgatctacttgcaagatggaatagtggagataacattttcctagtgttcttttgaagacacgtataattgtagtcctattgtcctgagactgaatgtacagatgaacccagccatgaatggagaaaacctcaagaaaagtgaaagaaacaaaaacaagccaacagctccttcactgggataaaaaccctcagctaaaaagagatagttactctaagaattgtactgttttattaagttagtgacttaaaatattaatctttttgaatataatttggcatggggaatctttgggaagataaagattgtggtcaatataacacctatctagccaccttttttgcgggtggttgggtcagtagcagtggaacaaactagtatgtaaattgagatttctaggaaaggtggaaaatatctggggaacaccattggatcatagcttagttattgcagcaataagaaaaatatatttctaactttagggttaatttcactcacgttttccttcatttagatctggtttttaatccctgatttagagccgatcttttaaattgtcattttacttttttagagctaaatggtttgaattggacttaaatattcggaaataatgttaaaatgtgaaattcgttgcttttagtataaaataaatgtatgcattgaaaaattctttttacatggtgattactttcatatattgtgatgccttggttttatataataattgcaatgatgatgatgatgataatgagattagctaacacttatgtgatacttccctttgtgacatgtctgaatttcttctggttatgtcatacagtggtggtaataatacacgtgaaaggccaggatagttctagcccttacataagtttgctttatacttaagctagtcttttagtccgtttttcctttaaacatcataacctattttggttatagctaccagttgtaactattttcacatagatttttacagttaatggaaaatgaacccttctggaagttatcctttttatcagcaatgaagattataccagtgcatgctttattacaacctagaatgagtgtgacttgaaaaaattagaacttaccaagttgcttgactccctctttgtccagtgcagcagttaatatctcatctcccattctctagggccagtcagcctatgttcaaatgtcagttcttccatgtattagctgcaaaactgacctggggaaaagtatgcagcttttttagttcactattctcatacgtaaaatggggtaatggtacctacttcatatgattattgagaagtttaaatgaattcctgttagaagcagtaagaacagtgtctctcccatggcaagtgccttatgtttttaaaataaatataaatgtctgaggctcattgccatcatattatcacagagcctgtatcaaggacatggaggcaatacctgcagtggccaagcatgaaaatctttgacagttctgttacttgacagctgtaagagctttggaaagttgcttaaccttagactagctctcctcattgtaaaatggaagtcagtcatagtgtctgctttgtgtggttgctgaggattaaatgagatgatatttgtcaagacttgtggtgagtcacaaagttcactgacatctcatccagatgggcggagaagaggtagcttcttagttttgattttaactaatgtgatcttcctcctgagcaaaccactgctgattagaaggaaaaataaattaaatgtctaagctgtcttagtctgatgtattgattttagataatgctctgtctctaggaaaaggtgctcagactttcagatctctgtgttccaggattttccaggtttctctccaagatgatgtctggtatgtaggggaggggaggggcttaggcagcctcttggtgggagagaaaagtctggacccataggcatagtcatggtgtccactgatcgcacttcaggaacagagaccaatgcctctggatggactctccacacccagcctttgctagggtgccatcacattatttgccaggcttgtgttctagctctcagctagtcactttctaatttcccccttaaacacctggactcccagccctacctcaaaggttgccatagggaacaaagagctgctcagaaaagctaaacatcgaggcctccctctgcctaactccctccaaatgtccttggtatggggcagcctgagagggcatatctttctagagccctgaacaggaatggggcagaaatccttcatccctcgggctctcctctatccacacaagagtctttaaggcacacacatctgactgctttgttccttccctgcttttccttctcacactcctgggatgagaaagagagatgacagtttcctctacactcttctaggccaaatcttcatttcaccatggaagaactctttgagccaaatcatttggatatgtgaaaagcaatacagacatttaaacattcttcctcaagacaatatgtcagtaagacttggcaaatggcctgttttgaatgccagatgctgaatattaactccttcttcctttatctgtcttaagaatgttttataaatttgaaaagcaaggaagagcacagtgatgttttccaaaatattaatccaaagtaagcgcataatcaatacaagctttataatgatgatgatgatgatgatgataaagtaaccattagcacaggataattgctatatagattgtttttacccttggatagcttctggttttagggaagagaccataacttcagagcacttgtgcacttggcatcatgacacgtaattgctccgcctctcacaattctcaccccctctgccccctccccatctctctggccacacaagactttctgctcctggaacatgaaatgatttttcctgctttggggtatgtaataattactactctgtcacctgaagccctgtttcccatatcttttcttaactgacttctcattttcagtccctgccttaaaagctgccacctcgattttcctggatcttttctggccaccctaaccnaagtagccatccccacttccagttactctccataccacatcctcctttttcttttcttttctgcataagtcactattttatgtttacacatttttttgtctttctactccactagaatgtaagcctcaagaggacaggggctgtgtccgctttattccccactgggctggcagaggacctggcacaaaaaagagctcaatacatagttattgaatacatgataagtgactgaatgctatcttatttcagataaaaagaatcattatgattattaacattggtgacatggatgtgcatggagcaaaagtaccttgcataagcacagaaataaggattttctatattatatttattatgaaccatagtaatggcgagaatatctctctccctttattattttgttctatagtgatggtggtggtagagtgggctagcactgcctcttaaaaatgataagaagtcctttgaaggaagacatcatgctcgtatttctttcacactttttttgatatttagctgctcaatacaaacatgttggtgatcattggtggagggagtggggagtgggtgagggaaaattacaggccctccatttgcatatgattaaactggcaagactttccaggcaaagcagtgcttcagaaattatgtgattgacagaaggaaggtcacatatgtactttctagaagaagagtaattgtcaagttgtgtgctgaggagcctcagagcctcagttggcaatggcttatgtggaaattttcatttgaacagagagttttagggccacacccaagtggaaactacttatttcaggattggagcctccacagagaaagatcagaggtgggaatgaaacaagaaatagttccagagactgctgctgtgtaacaaattatcttagaacttagcagctgagaacaaccattttttttatgctcacgcaggaagctacaggtcaagaagtcagtgaaggcacagcgggaataggttgtctctgctccagctgtgcagacttgaagggcaggggagaccggatgccaggatggggtcacataaagacaccttccctcacatgtctggtgatcaggatggctccgtgtggcttagtgtccttacagcctggtggttgcatgttgtcagacactgggtgtggagctcaggactccaagcatacgagttccagtaaagaagacggaagctacactgcttttcatgtccaaccttggaaatcacacggcctcacttccactgtcttctcttggttgcaatagtcacaaaacccaccgagttcaagggagatgacatagaccgcccttctaaatgggaggagggtctaagaattttgcagccatgttttaaactaatattaggttggtgcaaaagtaattgcggttttngccattaaaagtaatataaggggccaagcgtggtggctcacgcctgtaatctcagcactttgggaggctgaggtggatggatcacctgaggtcaggagtttatgaccagcctggccaatgtggtgaaaccccatctctactaaaaatacaaaaattagctgggtgtggtgccgtgcgcctgcagtcccagctactcagaggccgaggcaggagaatcgcttgaacctgggaggcgaaggttgcagtgagccgagatcgtgccactgcactccagcctgggtgacagagtgagactccgtctcaaaaaaaaaaaaaaaaaaaaaaaaaaaggaaaaagaaaaaatgtaatacaaatgtaaggatgaaagaagcaagcagaggggaagagaggggtcttgtattctggaaagggagataggcttgtgactgcgcggatccaggttacatttactgcacatgtgccctgctttttttgcagctagagtgttttgatgatcttctgagagaaacgtctccttcctcagctccagtgtgctcgggagctaagagctgcagaaaatcatttgaaatctttggtggtcataataaaataggtaaaggtactctcaggtactcaacgaccctcttgtcaccaagcagctcctcatcagaacttctccaaacatacactctctcctttccacctccagctcatcttgcttggcctccgctttttccgtcacatctcatctcctggcctttttcattcctcatccctaccttatttccaatttcagtcacatttcggtgaacacactgctcttggtgcttacagcaaggaaggctagttgtgttgaatttatagtactttttcaaccagccattgggaagcacatggaactccccacactcatttttactgccatttttttttcaacataatttacaagaaatagaaggaatgtgtattagctaattgtgccacgtggtcctattttctcagcaatacttatttttattaatgcagctgatagaaaatgaggcaaattttcatcaaaaagcttgctaatgtaaaactgagagtaccaggcagcctggaataaaataaagaaacacaattgtaatattactattttgggagttttacattaaactcctacacaataatcaaaggtggaagtgtgatcataaattttagctggaatttaggaatgtggcagcaactctggggcacatttacaggaaaatcatagactcaaatggaatttgctgaggactatatatcaatttgccatcagagtagacagtattagaaaccctggactcttcccattaatcattgtagatgtggcatctcaaacagaagagagttatggcggttataaatcgtgcactgagagttgttttttactttagatagagaaaacagttgaaagagtttgggatagcagatgtattgtctctggttcctccttttagttttaaaaattaattgtgcatttcagaatcctgtactttaaatatttagacatggcaagttttaaaaagaagatatgtagggcacatacttctcatccactgctgacaggcatcaggaatggggtaaatttggataggagatgcttatccattctatgtcactgcagatatgaaattttgtcttattgttgttttgatttagcangaaatatctttattattttttttccaatgatgagaatggaaatgttgtaattagttaagtctgaaactatgatttaggaaagaaaaaaaaaagtgcaagatgatctattgcacagagagccacccagagcccatctgttggatagaataaggaacccctgtgggtgtaattggggcaggaagaaggggcaggatatggtggaaagtgcttgggttttgaagcccaacttgtttttgagtccacgttctatgtttttcctttgtgttcttgagcaagatacttaacttcaataatctatgatctatacattgggaataataatcactatctagaaatggtgttttagagattaacatattataataaccttggtaaagtatctggcttatactcagtagaagtatctgctttatacccagcaaatattccttttcaaatagatgtaggccactatgttataattaataaagcaataccataagcatttgaatgtttctgcacaatgacctatttgctgtcttttgttaaattttcttagttgggggagtgaaactcctgactagctttgggctggatatagcatagcggtgcccacctatgtggaanggtttgaagagtcctcgacagggccagtgacctcattgtccttcatagagccaaaaattgcgccagttacagattcagtcccctgagttttgaacaaacttccaaaatgccagatcttctattataatgcaagtattcttggtagttgagaatggaggagagttatgagagtgaggtgaaataggttaagctacaggttgcaaactcattccttgctcctcttgggaaaactggacagtcagatgacacattattgcctggctgcaattggctgcaaggggcagctgcccagttttgatgggatgcccactcctgataggatactgatccctttcaccttactcttggcattctttagacattttcactgttttcctggcccttgcaacacctgaaaacttatttgcccacagttaattagagaagagaactgacagatgtcagccaaatttagttgaaagcgggtagtctgtatgtcagaaggctctattgttctttcattatatgaggtagggcaggtggctgcatctttgaactctagtttcctcctctgtgagaagatggcttagaggttccacaatctctctactttttctcattctctggttcctgatggtgatctgggttctacctgaagggagcccaggattagagaaaggaagaatattacaggcaaactggtctctttccaacatggcccaatccctcttggcggaatctgcttcagggaagttaagcgtttgtctagaaattatgatgtcatgttacggagcccttattccctcctctataaaacaactttcctgttgtcaattcttctgtaactatgttatctactatgctgaccacagggtacatgtggctttccacattaatgaaaataaaagaaaataaaatatcctgttcctgggccacacaatctcatttccagggctcaatagccacatgtggctagtagctacttggcagaggagacacagaaagaacattttcatcatcacagaaattctactcttgtagagagtgctgctctagaagctttaggccactgaagttgtattcagcgacctgacatcagagagtttttgtagtcacttgagcagaggtaatgcaatccctggggaagacttccagtttcaattacattcaggttaacaaagcccattgttccaaccaaaataatagttgctcaacattccattctgatgattttttttatccaagcagtcaacatagtttcattaaataccacccactaattgtgtactagttaaatgaggaatgaatgtggctctgtctccagataaatgaatagagagagagacaaaaaaaaaaaaaaaaaaagaattggctgactcggggtgctgggtacacaaaataacttggttaggctgtaggatcagaaaatctctctagatcttttttctagaacttcctttttcctagatcttcctttctgaggagaatcgctcagttttaacaaagtggccagtttacactaaaatgcttgtcatttatataaaatattggcatttgttgcaatattgcaaaccaaagagtcattgagttccaaactaaacaaaagttttatgaaacagtttgtcctgtccaaccttaaaaagagaaggcatttactatatgccaagcattgtgctgcctgcttcacgtgcattttctaatgtgggtttcacaatactttcttgacaaaggtcagctgtgcacctacctgctggagagacagcatcaggaaggagggaaagcagaggttgtggagtacagcagactgggcttaaatttcagctgtgttacttactaaacttcaagactttgggcatttacttaacttctattagctctagtttccctgtctgtaaaatgggggacatgatacctgcttcatgtgattgttgtgatgattaagtcagacaaggcaaaggaagtgcttggtgcaagacctggcacacagaacatgaatacaggggaagaggtcatcttttctgtccctactgaattgtaccttgtatatattggacactcagcaagtatttgttgaatagataggtggatggaagggtggaagtcacatctacaaaacattcttcatctgcagaacatttcctgngagtgtaggtggttgcctaagtacaatgatttggggaggccaaaagtctcttattcaacctcaaacatcatcccactggctctggctgctattttgaaatttaagtattcttcattctattcagttatatgtccctgttaaaagcaaatattactttagagaaggaacacactaagctattgtgtgccatggttttggtccacctgccgagcctcctaagacagcactgtggagtggaaacacctctgatctgggagctggatattctggcctccagacctggctgtgctagcatctggcctttcctgggccttgacctcagatttcctantaattaaatggaggattagactagatcttctgtaaatggtttggtttctggttttataagtgggttaccaggcaagtgagttttcatgttgaggcatggggcaatgcctgggttggatggctttggaaggtggcaatgtggggattatagccctgcaaggacagggagcttctgtccaatgtggttacagggtgcctgataataanagcataagggacataccatgaaggaacaggggatcaacaatgacagttttaggactgtttcacagctttgttagataccaacctggtttataaacatcccttaggagtcttcctggatattaagcatcaacataagatcacctggaatgaagccagttgactgctccaaacgtgatcttcaaaactgggtgcccttatgcagcaaggcttgtgtgtattgtggaaaactgctccaggacattctgaagcgtgactgtccactcggtggtgcaaccacggactgccagaagctactggcctggagcaactggcctagcccatagaaagcaggaatgaagcagctcttcgtggctgtaggtgtcccacggaacaagggtagagccaattactgaacacctcccacatgccaggcaccatagtgggcatttcacacacattgtctcatgtaaactcacagctgttccatgtagtagacattactgccttcacaacacaaatggggaactgcaactcagagaggaaagaagtagaggtgagatttgagaagatttttggatgccaaaattcgcatgtcttcccatgtatgtcgcacaacctccaggatgttctgcagatatcacttgctgttatagttcaatgttctctacccatgggcatttagggtggaattattgttctcacattattgctatttcaggcattgctggaacaaagaaacaatcaccaccagtggccccatctactctgagagagagcgtttgaagtcatcagtcgtattttccagctgtcagggttccaatttaagttttatgttggatctttttctctttactcttggttgattggagttataatctgtgttttcnttcccatttttgggtattcacatttagattttattgagattcatttcatagtgctttaaaaggttaacaagaagcctgaaactctctgggtttcttattaagatgcagcagggaagaagacagagtgtttcagtttattgggctagacatatctgttgattgacgcagatgctgcaaacatgttctgggaaccatttcaatgttctgtaataagtagcacattaatcaggactgggcaaactggaggggtctcagcagggttggagtttcctgggaagtgcctattaagatgaagaattagccagtgctcacgtttaacangtagactcctgagatgcggcctggagggagatgccacagagtgctgatcaacattggtgcggatcactgacgtgtgatcactttcacctgtacatcattatcagttcaaagcctccccctgccccgtgggcttgccgtgagagggaggctccatcctcttttttaacataagggcaggagggtntgcacactccagagatgtgtgtcatttactctttgcagcttcagcaattgagtagactgaagaaagatgttcgtgaaaggtggacttttctttttatcatcatttgccctttttctagatttttcattgtgaagtgtgttatatattcaagactttatatcatgtcatcaaaagcctaaccataaaataagtcttgagtatgcccactgtactgtatggagcatgaagccggctttttgtgcagtctccttgttggaaccactccttgaaatttgggcttatcatgtcctgacttttctggacagttttaccacataagatagtttgctaaacatcttccccgtatttaaaatgtggcttttgtgtaataaagccctgtggactccatagcagtaccaagtttacaaaactaccccagtaccacggttttgtaaacagtacccctgtttgcaaaaactggctctgttttaaaatagcttagatggcctttatcccaagtgcttgtgttttgattattctctgatgcagaattaaatgaagaaatttgtgcacgaagcaaacttcacctctgtatcccccaataccacatgatctcggctcactgcaacctgtgcctcccaggttcaaacaattctcctgtctcagcctcccaagtagctaggattacaggtgcctgccaccacgcccggctaatttttgtatttttgttagagatggagtttcaccatgttggtcagcctggtcttgaactcctgacctcaagtgatccacccaactcggcctcccaaagtgctaggataacaggcgtgagccatcgcacccagcccctcagttttaattctataaattaatggattttatagtaggatgttaggacaagaaatttatatgtcattacatatacttggggattgataagaatttatatttctttttttttttttttttttttttgagatggagtcttgctctgttacccaggctggagtgcagtggtgagatcttggctcactgcaagctctgccttccgggttcacgccattctcctgcctcagcctcccgagtagctgggactacaggcgcctgccaccacgcctggctaattttttgtatttttagtagagacagggtttcaccatgttagccaggatggtctcgatctcctgacctcatgatccgtccgcctcagcctcccaaagtgctgggattacaggcgagaatttatatttcaatatagcagaaaactaatgaaaactttcgaaccccagtcccatccacttctgttttaccattccacattcttgtgtagtgagtatggttctgaggcagtggtcactttgtgangcagtcatgaaataaataggagagaatctggccatacttgtgtttttccagatccaaaggtaggataagcctcagatgctgatgtgaatttagtgaggggtcctgatatggcntgatgcccttgctgttactctggttgagcacaaatgtgtccttttatatcatatatccacttgagatcttcaaggcaagcaattgaaacagactttggctggcttaggcataaaagtaacttcttgagagataccaggttatctggtggactcactgtaaagttgtaggaaccagacttagaatatgggtggggaaaaagggaagccagagccaaattaaaagtcacaccagagagccagcttggggagccatcactgctgctcctgctgaacactgggcatggggccggcacggccactgctggtgttggccttggatacggttgcttggtgctgctggacctactggcctggcaactggctgctgccaccacagttgccaggatgaagtttctctgttctctgagccactggccccggatttgaagccccaggatggatgtatatcattgtctatgaccatgatctgtgccatgactgccagagagtctgaaaaagaaagaatctggctatcttgactgctgtaatggaaggggctttgtttcccactaagattcacatggcaggaaattcatcaaatataggaagggtttcagataccagaaggccacagtctgacaatacataatcaactcattttatctaaaggcattcttttgaacctttaattttccttcttgctgacatctttattcttttaagccccttattaatagtctgtatttcaagtaggagaagaaaatataaagagatatccttcagttccttttctttatagctttcttgaagtttctataagcaatactaagaggtaatatagcctctgtcacacccccaccccaagaaattggattggagaagtgaacacaccttctgagagtgcaactataaaataggcctagaatggatcagatgaaaggaaataaaaagcaattatttaagtggggcttagatgttgcttaaacttggcttttcctcctctataaataatcaaattatagatctccagggacctaaaatgttaattttgggatgtatgcctcattgcaattcaaagataggtgggtgcttaacatgaggaagtagagtttagtgattacaaacagggtgttggggttggacagacctgggtgcaagtccttgttcagctgtgtgacttggggcacatttcttcaccctctgagtctgtttctcatttgaaaaagggcagtggtaatctttatctcacagagttggtatgggaattgaataaattcatatatgtaaatcccatattaagtatttagtaaatagctattctcattctaattcctgttataggagaatagaggagaagttggttctcttaaagtaaaaatgggttgcttttggaggaaatgtcaagcagaggtcagttgacaatgcaatgggtgttgtagaggaagatctagcactggggagtaagtgtggtggactgagggatgtcccaggttcccttcgatagctaactctatggtacagtaactctcttgagaactcagacaaggattagtcctctcagctgggctactcctgatgttgatggtgaaacaccagccactcaggcagtgtccatcaatgtcaaccctaatctggaaatgaactgaccaggccaaggtagaagcctgttggtctgtccaactagtaacagatccgtaaaagtgacagccacttttaccaccatcattatagctctgaccactttccctgacttgatttggccaatgtgttgtgtgagtggtggatggaagaagctaatacagctatggccttcttcaataatggtgaggtaccactatcatttgcaaatcagttcaaaaataggaggtcttcccagctgggcactaagagctaattctcttgggcaattttttttattgcattcaaccatagangattaaaaaacaaaaaagaatggcattttctcctcccaaagcaaaacctcttggattcatggtctatcctaattatatcttctggggtaatcctgagaaatcttgtccattccagtagagcctgtgctgtgaatcanctgtaagagtgctcacctagttttgctacagtgcaagaatttcaaggtctaaactctatgaacaaattgattagggtaagttattgcctataatgtgattaaattatactataaggaattattttatctgatggttttccaacatgagagctcaggcagaatagcacaaaggatgagattatagatctactcatgattttcaagtacataatacactgttcttaactatagtcaacaccttgtgtaatagatcccttgaacttatttctcctagctaactgaagtttcctatcctttgaccaatatctctcccacttacaactctctgtccctagcccccagtaaacaccattctactctctgcttttgtaggtttgacttttaaaattttcacatatgagtgaaaccatgtggtatagtgtttgtttttctgtgcttggcttatttcacttaatatgatgtcctccagattcagtaatgttgttgcacatgacatgatttccttcttttaaggctgaacaggattccattgtgtatatataccatattttatttaccattcatccattgatggaaacttaggttgattccatatcttggctattgtgaataatgctgcaatgaacatgggagtgtagctatctcttcaaaatgatttcatttcctttagaaatctacctagtcatgggattcctggatcatatggtagttctatttttaattttttgagaaacctccatattgcttcccataatggctgcactaatttacattcccatgaacagtgtgcagatgttcccttttttccatattcttgctaacacttgctaacttttgtcttttgatgatagctgttttaacagatatgaggtgatagctcattgcagttttaatttgtaagggaaatgcacatttaaaaatactgtgagtgctagtagtaaatgtgggatcctaaaaatttgcattggaccacgtgaagaatttcttttgtgaggccggaaaatgggctaagagtcagaatgacctagtgttcgtctttgtttccatacaattcccaacctaccttgaggtccacgtctgaatttggctgttgaaggctttaattttcaaggaaaggaaaggtctgcctgggataagtcggccagcaagtcagcagaagcaagcctaagactaaggaaacacagatctacctgttgtctaaggccaagctggcatagatacctaactctgggtcttctctgtctgggggcaaaatctccagccttgaataggagtcagacctgttatggtggctttcacctgaagtcccatctactcacgaggctgaggcaggctcccttgaggcaggatcccttgagcccaggagtttgaggctgcagtgaactatgatcacactactgcactctagcctcgacaacagagcaagaccctgtctctaaaaagagaaaagaataaaaaaaaggagttaaaagttaatatagaaccagagagagagggaacaggtcttctcagatggggtaatccctggtttgactttccttctagccccatgagaagaagacccgtaagaaaataagggaagaagccaaagaaatatgtggcagggtctttcccaggtggcagcagcccaacccagttcaccttcctgacttcataaaggaagacacaggaggcttttcttatttttactcctctcattagactccaccatctgcaaaatgttgtctaataataaactctcaggatcatctattttaacatatctgctcctttgtgggaagagtgagtgtgaaaatttgggaacatgcgcagtggataaagctgttattttatgcaaaacagaaaagagcagtgccccctttgggtggatgtagccctgtaccagtgcacacagcttggtattctcaaagaagcccacaaaacaaccaaggaggctgttccagctgggcactagtagctgattctcttggtaaccgtgggctgggttttagctntcacatgcctgcttgagcggagtacctttgtgtggtaaacaacctggaccactctacatggtcccctggtggtggtaatgggcaggcttaagcggtgtgatattggttagggggctcaaacaactcatggaatgggcacctaagcaaggtagagagatgcagagcggggagggaggagttctgaaggggagtttggcttgtttgctttttttttttttcttctatcttggcaccctttattaacagaacacagtgtagattatgcattgtattttgaaaaagaaagagaaataaaaggcgtaatctttgcttttgagatgttttcagtctaactcagcaattcctttccctcatcctttctgcctcactacttattacatttacttctagttcttcctctttaaattgaaaaagcagaggcaaaaccagacactgtgataatggaattttatgttgtggtctttgattacacttcccttccaaagcttcaatatttcacattgttaataataatgttctttgtaggaaaaaatccttaatttgaaaatgttgcagatggccttttatcaggagctatggactgtcaaaataaatagatataattatgaaccattgttgttgaatgggccatcttaaataatagcagtcaagtttccagaaattaaaaaaaaaaaccttacattttaaaaagacctcagaataattagtggtctctggttgattggttttcaacaagttattcagcagatggaggctgtcagatttctgctggtacgattatttttgtaactcagtggtggaggggggtggtttatgcaactcagcatcacctctttgttgaattggatttggtttaagagaatcccaccgcacctgtacattaagatggagcatgaggaaggtcttgggaccgagccatttgaagaaaatctaggctcnggtgggtcactttaggagtattagtatagccttagacattagctcttggaactaccctgaaggcgaaaatgtgagacagctaatatttctctgcaagaattccttgggttgctgagttttggttcttgccatcaagaaaatgtttgtaccggagcaagatgtggaaaaccccagatgagaggatattaatgtagattcatgagctctgccaaagtaatgtcattactgctgctccatccctgaagaaagatcttaaacatatgtaaatagacaagacaagttataaattgtaatttagtatctggtaactgaaagtctttacttcatttgtactgagtgattacctgaatttactaaggaaaattttggaggtcacagatttgagttgaagtcaataaaataggataaaagtctagatgatgaaacttagcttttgttgattagagttctgtttagctcttaaaactgcagtaaataaaatgttatattagtggaaaatacaaatggattcagaaaatatagacaaatcgataggcaattgaaatgtatacattttattttcaacatatcaaacctcgagttcaaagttcttcataaaaacacaattcctaaattaactttacaataactgtgagcattcttatccccatttcagtgctacaaacccaagttatggggagaaaactttaaaaggaggcaagagctgccactataatttaaaatatattgttctccactctttttacatattcttgaaagcagttcattaacggtgaccttgtgtaggaaaaattagcatttgtgccaaaaaattctttgtatgtgttagtttgtgtgcatattttggagtcttcatgttaaaagtataggacagacctacttgacaaaggtgaattttgtcgaaattttggggagaatatagatttgaattcatgtaaataagattgaataaaaatccagatgactgaaacatatttcatcttttgctaattagagctttattgagcacttaagctgcaaaaaataagaggttatattagtagaaaatacacatggatttagaaaatttaggtaaatctgtagataattggaatataactcaggaaaacattcaatgaaacctctttttcaacacatagattagtaccctaagagagttaaattagtgttttactgtgaaactattttcttccacaccagaatctattgtatgttggcaaagaaaaatggactagccattcattatcaccaagagtttattacttactctggccacctcagtgttcagtgggtacctaaagtgaaaagagttttaagtgctacctttgcagtattaagtttgagtgaatccagggatatttgctgtgagtgtggcaaaatgattattgtggaattggttgttgaatttgaattttttgttgctggcaaaattcacattgccaagtcctccttttaaattgaagagtattttaagtgaaatgcaatacaaacatatcttattccttgaacttcttgattaaattggtagtgttttttatttgtagtaggctacttatagagttctttttcataaaacttgaaggttcttcttcataaatcttgcagcttcaaggggaaaaaaaggaaaaaagaaacttatttcctcttagacccttactgtcacacctcaagtattggacacaatgtgcgatgcttaaagactctcttggcttagaaaagcctttctcctctcttggcaaatcaggcaatgtgaaatcagtaagggcccagttctcactgttttcctatgaagttgttccgatgtgtgacacatccaccttatggaggtttaagttggttgtgtcttgaggctcacaaaagcaggttgtggaattggtataagcatttgatttatttgaacatatctggtggtgtgtcattgactgacccctctgttataagctttccttcaaaaaaagtccatcagagacttgaagtttcacaatcaaagctttgtttactgggcatatttttcagcctcaaggaaatcttccctggctccctgtagaagcaatagttacaccttccttaggggaagaacccgtttaaatgtgttgcacatcttcacctcttttacttgaataagaagtttacaatcttccctgtggtatccttcttaggggaactctaggaagaaatgtttgatcatgagagtggtaactggaagcatgaactggagtacggtgttccccatttaaagaaattttgcttaaatttttttttaaatggctttccagaggtcaggcaaaggccagtttccccttgatattgggaatttcagggtgggattaacaaaaggctagaaaatgaagatggaaagggatttatagctacatagcagcagcatggacaatttcctaatgtgcatctctaattaaatattggtgtattagcttattaattacttcaacaaatattcattgagtatctctgccaggcaagaatctgggcaccagagttacaaaagtgaatgaggcacatttttcttcctgagggagcctagaaggaaatatacaattaactacagtcattgtttctcacactaccaaatgaaagaggtgaggcttacctgtttctcaatgtcgtttttctgaggacaaataaatgaagaaacttcaactagaaaaaacaaaaatcatattcacagttggattgtctgtacaatattgtcatcagtaaatcatgtaatggtattataggacttggactgagtgtgacattgccaatttcagtttgtaatttgttcaaacttgcaagtgataatgtggtactttattttgaggagcaaaacaataaaaaccatcagtacaaactcagggtatctttggtcctagagatctctattcacaatgattccttacactgtgtgaagtatgaaagttctataaaaagatttctccacaattcattttataatagtcctgtcagtaggttttattaactctacttttctgttgaaaatatggagtctcagtaattgtgattgagttagtcatcccaggttataaaaccaacagtttcagaagggtcttgaatgaaatatcttctgcctttcaatccagggaagtttgtactatacctcaacaaggactaaaggtaagggctaaacatggaacatcacagctatcaaattgatgagagaggccttatcacttcttaggttgctcaagaggatgatgtgagcagaataatggcccccaaagaggtttatgttctcatctctggaatctttgaatacgttataggacaaaggagagttaagattgtggatggaattaagattactaatcagatgatcttataatagggagattatcctggattatcctggtgggcccaattcaatattttaaaaggtaggcaggaaaagagagggaattgtgactaaggaaactaaggggcagtagtcagagggatataacattgcgttctttaaaaatggaaaaaagggccacaagccacagaatgtggatgatctctagagctggaaaaggcgaggaaagagaatttcccctagagcatccagaaagaaactcagccctatgaacctcttggttttagcccactgagactcataggacttctgtcctatggaactgtggcatgataaacttttgttgttttatgccactaatggtaatttgttaaagtagcagtaggaaactaatctgcggggtggctgttagagcctgatttatagctatctaccttcagagcagacagtgtgactgggagccccctgtgatcaccatgtggggatgttataggttagatcaatcatttattcaattatttattaataaacatttattgcacatctacttggtacaagtcactgttctaggccaaacagtaaacaagacataaaaaatcttgccttcatgaagctatcattgtagaaggggaaagataataaataagtaaaatgcatcatatattagatagcgataagtgatgaggaaactgtgaggaggtaacagtgataggaagcagtgtgtgtgtgtgaatatgcatgtgtatatgtgtgcatgtttatattaggtttgtaaattttagatggggcttctagggcaggttcactgagaaggtgatatgtaaataaagacccgaggacttcttttaggaaggaagaaacagccagtgactttctatcccaagcaaaggaaatgcaaaggctctgagggcagagggttcctggcacgggagggatgggagatggtgaataggtgagaatgtaggtaaaacttccaaggtgccaggttgatttttttaatagtagcttatattccccctcaggccaagccttggagattttctcctcagctggtggttcttgttttttttttttttttaaattatcatttctactgcagagaaaaagcagaccatttccaaagggcagcctaagggagctggaggcagagagtatcagagagtgtttcagtgctgataaccaattttatggatcagtcattttaattaataaggagaatgggggaaagtgatgcaaacaatgtaagtcctggttggcatttccttgaatgttgaatacctcttacttttcaaagggtaaggaatttggttagtgactggaaacaggcagaattggggttgcgctaaactcaaccagaggtcacagagtactgttggcaaaggttggcctctttttcttgctgcacgtggctcgtatttaatatactactgcagaataactttgatctctctgcctttagacagaagtcaccaccactatccccctaaagctattggctagcatttctttaaacaagcaggctgcacagagctcctcatgtgactccagcaggggaggaagggaggaagttgcatgggttggacacccagagctaagaagtagagagatgtaggtagaagggccagccaattggcagcagtaggctgcaacagccacacacttgccccgggaagtgggaaataggagggatgctagagcttggtttctaacatggcaaagatctatgagagcgagagagaatagtaatggagtaaaccaaaggaagaaataagatgcctccagagggatatggcagctttaaaacatggcctcaaaatcctttgacactccttccatcaagaaatggggtctatgtctcttccccttgtatcctcttgtgactgcttgaccaatgggatggggtagaggtgtcagtttctggtgcagaccttcagaaatgggtcgcttctactttgtgtatcctgagaggcttgctcccagaacccagccaacatgttgtgaagaagcccatagaaaggcccgtatggagaggaaactgcagtcagccatgtgtgagagtcatctttgaagcagatccttcagcctgtcaagcaattccagccgacattacatggcacagagatgagctgtgccttctgagccttccccaaattgtagatttgtgagaaaatgaaatcactgttgttactttcagctactaagttttaaggtagcttgttatatgtgaacgattgtaacagggtgcattttaggtgactaggaaagagaaataccaggtttcatgcaatattgaggttgctttgttattcaagtatataaaatataaatcatatgattaaaattttttaatcatttagagtttttttattctctccttcgaaaaatgcacatatgccaaccttttgaatacagtttcaagagtctgaataccttctacatccatccatgggcatagactccaagctgagaacctctgtggtcagaatttcttctcactactgtgttataaagtgcaatttggtgtaagcttagggaaggaagagggagaagacactggactttctattgttagacttgtattttattccaatcctttcatagatttgctctttgattggagataaagtgtaaaacctctctatatcatattctatatctatatgatattctatatcataatttcttggatggcaaaatgtggattaaaattctgtcctttctttcctcaaaggaatgttgaaattaaaaaaaagaaaaaagaagtgaatatgcttagaaaagccataacttgcccataagaggtacacaatgaatatttgttgaatttttagctgtcgttattgataatggattacttaattaggtcgctgtggtgttatgatatagatacttgttttcatccatggttcctggcttctagctcccataatccttgttataatgttggggcactttaggcctcaggaaacggaatctttccctctaaccttctcctgtcctcctttcacttgcccaaggcaggactctaatctgattgtcggtcaaaataccctcattccagatcctgtcctatgcaggcacatggatgaagctggaagccatcatcctcagcaaactaacacagaaacagaaaaccaagcaccgcatgttctcactcacaagtgggagttgaacactgagaacacatggacacagagaggggaacaatatacaccagtgaggggagggaacttagaggatgggtcaataggtgcagcaaaccaccatggcacatgtatacctgtgtaacaaacctgcacgttctgcatatttatcccattttttttttagaaaaaataaagaaaaaaccccaaaaaaccaaaataccctcattccagaaagagtcctgctctatacctaagaggaatgaatgctacacagagaggccaagaaaagtctgagtagataggcattgatgggtttagatcatgcactttttgtccaatcacatttctacagggttgtcaatcatgtttatgtaatgaagcctccataacaacccaagaggattgggtttggggagcttccagatagctgaacacgtgaaggttcttggagggtggtgcatctacggaggacgcagaagctcatgcatcttccctcatacctcaccctacacatctgtatcctttgtaatatactttataataaactggtaagggtaaaagtgttcccctgagttctgtgagctgcttccaattccagttaatcaaacccaaagaaggggtcatggaaaccccaacttgaagttggttggtcaaaagacaccagacttctgactggtgtctacaggtggaagcatctttgggactgagccctcaacctatgggatctgatgctatctccaggtagatagtggcagaattgaattagaggacccccagttggtgtccactgcttgatgtgtgggggcaaaactccacacttcgggtaacagaaggcttcttctgtgttgatgactgttgttgtggtggcgtgagagtagaggaaaaacacggtttgagagagcttttcctgacacagaagcccagacctttaagggcaaagttttgtccataaaacaaccctagaacaaggtccccagggaaaaagcaccaaagggtataggagtggaaagagggggtcagtacaggcatctctgcccctgtcacccatgttacattttaccctctgttatccttcattttatagtcagtgtaggggaactaggagaaatggtaacacgcaaagattggtatcagtttacaccaaaacagaacacactgctggtgagcacagggagttggaaacaatatacacaaaagtctcacaaaatagaaaagaacatggatactggctctaacattgacgtcattgggatacaaagtctatttacattgtttcttatgaggtcagcaaaacatttcaaatagcaactccttggctgcctgcagtgggtctgcaaatgtgaaataaaacatgaactgcagacctgacttatgagcaggacgttccaagtttccttctttgctttttctgtaacagatcaccttgtccttgttactgcattggtagatttttatcatctcagatgaaagaatcctagtgttggccagggcaaatccaaaacacaggtgatgagaggcaacacccaatgttaaaacctgatccactgtggttatttttctttcccattgggaaactataaggatgcaaatgggcaggagagtaaaagcagcaatcacgtctgcatggactgaaggcaatttagtttctatcagacatggtgacagtgatcaatgcatcacaaaatcacaaacaacagatgccaagcacaaactgtgtcacagatcccagatcaaagatatctaccatatgtttagctttcacatcaatgtacatcaagtcagttttgaactagaagcctttagatatacagttcattacttctttctcctttttcatcctcttttgtctccaggaagttcccagaatccgaatttaatcattattcaggtttgggtatatttgcatataaatgcattgcttgtgatggatccagtgaaagttcatgcgcagggctgcccctgcccaatgctgcactggctttctgccccatcagtgctggagctggcagaacccccctgcagaggaacggaagcaagtgacctagaggggcctgcaaagagtcttaggagggcaattacaacacgtgtttcttccttttaggagtatctaattgggttcaatgtgaaggcagctcactgtcaggcacatagaagagactctgagttagagaggttgaaatgtggtcacaaaatatccatgaatgtattaaatccataaggatttattaggggctcttaagcatttgattccctttaaggaaatcactgctaataaagaggcacacagcttgagaagctgaagcagagtgaaaaaaattgatttatagctcataggtagagaaagcaaaattcctaattagtcatttttttttaaagcacgtactaaagggaaaattactatatatttttttccaaagtttccttggtctggctgttgtttgccattttaattacagatttattatttattttgtataatatataactcaggaattattattatttaatttttcctcttttttttgcattgggcttggtgctggggaaacagagacaaattatgcagagtcctttcttgttgggaattcacactctggcagcctggtgtagccatgtgcacaaacaactactgtgcaatttgatgagagagacagaaggcagggcagtggcacaggtggaagtgcccagctagggtacaaggaattgagggaaggctcttgagagagaaagagatctgagagctgtatcttcctaaaaagttggtgtattccaggtagatgaaaataggattgggagacagaggtggacattctgagaagggggagtagtaagtacaaaacagaggtggcaatagcattatggacttggggaccgttagtaggttgataggattatagcacataaatattagaccagaaagactgagaaatgatgctggagaagaaagtaggacacaggtcatggaatgacttgcaggctgcaccagaggcacttggattttatgagagccttggaaggtttctgtggcaagtgttgccagtgcccctctcatattcccttggcagtcactgttactgtacaagacaacagctacaagtctcagagactacaagtttgcaagactgtaatgaggcaggcccaaagcaccagaagttaacatccttgagagcatcgctcagacaatgatgcatgaatagctcagattcttcacccctggtgaggatgagtctgcagcaggttttgtataatatcttggaggttcccggtgacattgagtctcacctgatcacagcagttgtctggtcatttacacaccagtattgttccttcccatacttgccattcttccataccctcctacattttgcttcctggaatcccttctcgaaaaactactcatgcttaaattcttagctcaggctctacttctggtggaatccaatctgggacaggtttttggcttgtggaggaacagtggcaatgaaggcggagtctggatgattttcatgagaatgcaagagagagtggaagactctggttcaatttagaaagcacagttcgttgcaattatggccaagctgtatgtattctgggagacagggaaggacttttcgatgattcaaggtttaggtttgttgactggtgggatccattaagcaaaataaggaatacaagaagaggaataggatttttggtgaaatgtgtgggatttggatttgattatgctgaatttgaggtatttccatggacagtgtaggcattggggaagaggactagttgcgacaccccagtttggaagctgagcatcagcccctgagtagtagtagaagaagtgggtgtggctgtggtcactcaagctgagtgtggggatggggagtaggaagaacccaacagaaacaaacttctgggagtaccaacctttaacaatcaaatagatgaggaggaacttgctacagtgaaggagtgatctgtagcaccaggcaagggccaggggagtgatgtcgtagaagccaagaaaggaaatcatgtcaggaggagagaggaagcaaacagagtcaaagactgcagagaggcttggcaaggtcagacttcaggctcccattggatttggaagttgagtggtcattgtttatttaagaagttcatactaatttggatcaattagaaaagtagtagagattacctccacttaagacatttagttttattacttgaaaactaggctaaccaataattgcctaggacagggattgctttaatgaataggtaagaataatttctaattatagggtggcatgatttgcgttaccatactgaaaaatgctgcccctctatttgtatgatttgtatgaagttcagtacttggaaagcttcaagtttgttcacctaattaggtaagggtttttcttttaagctagttgctgttttttagtttcaagttggtccctatttctgtttgaattatcacaggtttcaattttatgttgccaaaagataagatttaataccatagctgatgcccctttgaattttgaataacaattctattttctttatactatttagttatttgtggttaagaatctggtctgtagagttagactgcttagctattacagtagcttcaacacttactctttaagatccctgggtaggtactgtgcttctctgtgccttgatttcctcatctgtaaaatggagagaatacaactttttttcagaagttaattcttagtaccaaatgagctaattcatataatgtatttaaaggcattttaaatggcacagagtaaatgatcagcacattttagcgttagaaatatttgttagtattttttctatttataatttgttactattactaaaaactgggaggcagaatagtataaagtgataatgattgaactataaaacagattagggttctgctctcaaattttccgccaactctctgaactgggacaagtccattcacctctctgagttcacattcttcacctataaaagagggaggttagaatagaacatctttcaagccagccttagttttaatattctgggaagcacaccttttgcttggaagtagctgatttacacagtagtcttagctgtagtgtgttttcccctaagggaaagataaatgggctaaaaggagaaatggaaggcatttccattaggcaattgctttctggaaagtacaactaatgttttggttggtttattttcatagaattcatttcttgggctaaaacataaatcagttactatattcagagggcttatcatttcttttttgagtatacttatggttggaaaaattccaagtgtttttcatttttttgccctgttttttcataccttttacagaaaaataattgtttttagtgcattcatttcatttgctaatgttataatctgtacaaaacagcccacctaattattcttttagatgttaaacatgacacatgtaaataaaatgataattatagaatgtggtgttttcttgtatcttacattttttagatctgaaaattggtccctgttcttattctgcatgtactccagtgaaactttcccttgatgagttatttttcatgcgcacacatgggggagcttttgagacactagtttgaatgttacactttgaagactttctcaacaacttgaccctaagatgatggactggaactcttcattgaaggaagtgtagcagggtgcaactggctgtagaactgacttccctagcgctcactgtctcatatgcagccctagaaccaattcataaatctctttgaaagatagccataaacatgtattctctcacacaaaagagtagggctaagaaaatgaaaacgaaaagtgaaggcagatccagtattttctaaaacttcagtaagaagtacctgaggtcataaacttggggggctgcctcttccggtgaaatgggggaagtcagccagaaactctgattttgacagcaacattatttaaaggagtttctgaaatgatcaaacatgttcttccatagaagaataaaagtctaaaagcacatgagaatatttttaaaaaatcacctctggaggaagcagaaacaaaagtgagtggcttgagttgagtccgatgctcttggtgtctagctctgtttgccatttaaagaaaatgcagaaaaatagaaatgtgttaagtgaaatgaaaccccataggaccttgactgactttattgttatctttcttttgaccctaatttttggggtagctaaaaccgcaaataaacatatagaaatagacctggtgttagccacatagatacatgaagtagcatcaggaatgactggggcttttctctgccccagtttatttggaaataactccaaactatttcatatataaatatatatatatttcaatgcttatcataattacatctgaatattttgctcataagacaaacttctaaatgcccttaaaatgaggcttcaatgaggaaataaatacagctgattttaaaatgttatttagtatcaagaaaaaactctttagcaaatatttcctgtgaaaagtatacagtataactagcttaatatataaaattaaacagaatctttcatgatgaattgaaaataggtaaaatttgttttccttctcattgttttttcatatgtagacagccaagtttcatccttcacagtttgtgttcaactccttgctgtttttttctctaatcttttcctcagtgccttattcattctcatggttttaaccattaactatattcccattctgggctttcatcacagattccagttgtacattttctattgcccattggatgttcctacctggatatggaagtcaaattgaatgtcagctaccaaatttaccttccatcctccacttgcttcctcggcttctttctttacccaccctcccagctcaccagttccttctgactttcccgtatctgttcactaaactaccattttctgaatcacctggccttggaaatttggtgtcatctttgacattaacctgtctcatgtacactactgtatcaggggttcccaaggccaccctcagacttgctaaaaggatgcatgggactcagaaaagttgttatagtcacaattatgttttacttagtgaaagaatacagactaaaatctgaaaagcaaaagatatgtggggaaaagtccaggagaaattaggtgcaagcttctaaaagtttttttccagtagaattgcacagatgcacttaattctgcaagcaataccgtgtgacatatgcaaagtgttgtcaaccagggaaacacttgagctttgatgtttttaatggaggccagccacatagtcatgcagcacctgtatgacttacctcagctactcagacttcagctcctcagagaaggaacaggcagccatcatgcatcacattgttagcataaactatctgatcaaactggtaccacatgctccaaggcctgaggcatacaacactcttaccaggcagaatatacctgtggctcaaggcttactctcaggagctggcctaagttcagtcttgaagagaggtttttcttgggcatgtgcagggcttgagccacctagatttgctgagttaatcttactacacatgcacgaaaaatcaccaagctttgttggttactgggaaaattcagagcacatactgtggtgttagatatgtgtttgagttctgcctttgagacgattaaatgagatgtgattaacatactgctggacacataaatactaagtgatgtcgatttctcgttgttgtgatttttattatctctgcccttttctatccaatatcacttcttatgtttagcctaagaccttattgtgttcaccttcaaggtgcactagcttcccatatcagtgaacttaggatgttacgctgcgctaacaaacaatctccaaattggtatcacttgctaaaacaagagagttatttcttgatgctgccgtttgtctattatgagttgactgcagctctgctccaaagtataatcattctgggaccccgactgaaggaacagccctgatcgggacattggggcaaaaagaaaagagcgtattatagaaccataaaatggctcttaaaattttgcttgaaagtggtgcatatactatgtattcccattttattgtctaaagtaagtgacacatcccagcctgaggttattggattagggatgtatactattcccttggaatgtttgagcagtaatataatctatcaacttcctagctagcctctgtgttaaatgatcattagagtatctaaagaggctggaagcagagaggccagctaggatacactaatctatcctgctgaccatcactaagttcacatcctcaaagttcagtgttgacaaaccatttctgttctctataactgccgtatcatggtcttctcttgattagtcacgtaagctcatttttaagctcaatcacccatgactttcctatacgcaagtgaaaccataaaattaaccagcatcgggcacattttatcttagcaccttttatacctttgctcatactttcactgagattgagggctcttttttgaagatagttaccatttcattcacctttgaattctccagagcccaggtaccttacctgtggtcatggctgaaacatgtaatcaattaatgtaagaagaagtattgtcccagtgtttcaaagaaatccaggtgctattcaatgacagtgagacgtcaggccaagggggtgaagggaggctgaaacccagtccatgctttgctcacaagccaagtcctgagatgggatgaggagaaagaggtgtctttttctaatctcattaaagcactgagtagtgtggtgggggcttttcttctggggttttgtttactaaaagacttcctacaaagaacctgtaggccccacaaagatcatatgcatggacattattgtagggcagcaggagaaaaatgctattttggttctgctttctagaaattttcaagtgctgggctaccaagtcaactagctcctctgcatcctttagatgtctgtggctgaggacagcttcatgagattgggtcctcagagctgctttgcacttcccaagaatagacctgtggaccatgtcctttttgtccacccaagttttatttatttttgggacagcacctcttttaccagagaaagtaactcttgcggctaaaaatataccggaaataagaatgaagaaaagtaactggatcagctatacttggtaaaaatacctaaagctctgtttcatgaaagtgtttctaaaaataaaaactagtccctggcaatgcagcaaatagccaaaacgacttctttggttgattggttttaatgttttttttttttttcttttcctggttacagttttaaaaactgctccacaagaaatttcttccaaattcagtgccaatagggagcattgcctattagcaggcacacaatagttaagagcagaaaggcatgcaatagggctttgattgtccaaggcagggtaaccatgtatgtaggacctttattgctgcctgggaggtgcttcagtgtggggagtaaatgctcagtcaaatttggcataacagctttaaagcaagtggaaccactgtgcatgttgtcagcaacatactgctttctttctttctttctttctctctctctctctctttctttctttctttttctttttagtttttgagtcggagtgtcgctctgtcgcccaggctggagtgcagtggtgctctctaggctcactgcaatctctgccttccgggttcaagtgattctcctgcctcagcctcctgagtagctgggattacagatgggcaccaccatgccctggctaatttttgtatttttagtagagatggggtttcaccatgttggtcaggctggtcttgaactcctgacatcgtgatccacccaccttggcctcccaaagtgctgggattacaggtatgagccaccatgcctggcccttttttttcttttaaaagtattttacttatgtttctattttgtgtcaagggggctggttcctagattactgagggaataagccaaacagagcaaaatttgtgtcactcatattaaggtattaatttcagcactaatgagatgttgaaaaacatggcaaaggtgattagaggatattgaacgaaggtaaattaagtaggtaaacttggatccttatgttcggaatcctggtattaggagtagagtatggagctaattgcactgtggttggaaagggttttaaattatagagaagatgaagtttgatcaacccaacatgtgtcccctttactagtgggaagacacaagggcattcatgtcaccatgaaatattcttattaatttattgaaataccagtgtatttgtggcattttgggattactatcattaccataacagaactgttcttgcttcatatttatgcgctccaagattgctctaaaattccttcatatccaactgggcaattatgattcacccattggacaaaacaatatagttctattctagcactcaaaggatgtagtcatcacttccaagagtgagcagactttctggagccaggtcagaaagagacattaatgttgtcttcatttaaatactatgtgtagaaaagacctatgtatttcccattgagaagatggatcatctttttcaggaattgtttttcatctgtagtctcatcagatcctgttaatatattttactttgcctttgcttttttttccatttgaatatatctttttctcctttcagcatgatgaaacgtcatttaattataaatttttgtcttcaagacctccctttaagcctttaacggggagtaatataatgactactggtaggtacagtcagtcagtcagttacctctgggatcattctttgcagttcttggctcttggtttctgtaggagttggcaggtagatgccaaattttctgtctgagtggtcactcatgagatctttgactaaactcatggattgtttcttatcgaggcctgagttggccctgttgtctgttttggctaataaacaatatttggtcagaatttgaagctgatagctttctctcaatgttctaaatagattctattcctttaaagtggttaaagtagaacaatccttcaatcccttgatctgatttatggcagtagtaataaagaggattgttaccccaaatgggccagttgtttatgcttgtttattcatttattctggaatgtttgagtgtccacgatatgctgactctgtgctagatactgggggttcagtagtgaggtccaagtcagatatagtctttgtcctcatagtgtgtaaaatagtgaaatctaatggggaatacagaaataggcagtgacaataaactgtattgtgaggaatgctataggcgagaagcacagtgagctcacaggaggcacatggacaatatttggttgcctgtgtttaccaggaagtgtgctaaaagctgagtttacagttaactaacaaaatagacactgtccttgccatcgtgaaacttactattggtgaaagtcagtgttgactgaataattacatacatgcatacgtacgatgttgctataaaggaaaacacaagttgtgatgaaaggctctatcaagggttccaatttagactgagtgttgaaggaccatggatcagaggttgagacatttaggctgagacttatcatttggagatagtcaacaaagaggcggaagagaaagtttccaggtggaaagaacatcacttgctaaggcctgggacaagtgggaatgggagaatgtattgagcagaatgtttgctatggttatgtcattgtgtgcagtgaggggtagaggcagagggaaggaccagagatgccgatgaagagtgaccaggatcacatcaccagagcctattcaaccacaggcaagtgtcttgactttacctggaggggaatggaagagctactgagtgttttaaacatgaaggacatatgagcagattgatatctttggaaattcgctgtggcttctgtagtagattgaagtgtgggatgcgttaggaggcctggagactagggagtaggaggctgttacaggaaccccggctaaacagttcactatagagtaatgctgggagtgtgagctctggggccacaatgtttgggcttagtcttacctgtgtcactcaatagctgggaagctctgagccattacttttcttctctggcctttgttttttgcttctgttaaataaggatgatgataacaatgatgcttatctcatagggttgctgtgggtttatcaccatttagtgctcagagcagtttgtggcccattctgggactctgatattcataactataagataataaatttgtattgcttcaagttactaaattggtgacaatttgttaagcagcaataagaaactaatacaggactttctgacgaggcctgacagttgtaagctgtaaaaatctgggaatcaggagatatatatacgtatgtttagatggagtcttgctttgtcaccaggctggagtgcagtggcgcgatctcagctcactgcaacctccgcctcccaggttcaagtgattctcctgcctcagcctcccaagtagctgggactacaggcgcgtaccaccacacccagctaattgttgtatttttagtagagatgaggtttcaccatgttggccaggatggtctcaatctcttgacctcatgatctgcccaccttagcctcccaaagtgctgggattacaggcatgagccaccatgcccagctggtagtatattataaaagaaatgatattagatacactgtattttgtgtagcctgtgccctccaaaaatgctcatggttgaggggccagtacaggtaggaactggctttcactgataagccctgtgcctagggaagagactccttttgtaatttatccatgtaaaaggggcatctttttcaaatttacacatagtcactttgggtagctaatggcagccctgcctggcacaaattaagtactcaataaatgatatctgttactaactgttgtatgtgaaaattactgaacctttctatgcccattttcttatctgtaaaataatgatccctacataataaaattggttataagaattatattaatatatgcaaaacacttaaaatagtgcctggtacaaataaggcatgccaaaaagacaaataggggtagggagcattcattcattcaacaatgtttgagagccagctatgcagaagcacagggctgtagctggggagaaagagacagatatgtccctgtcctcatagggtaaacaaaaatttaccctgataatgatttaaagctgtgatgtgttataaaaatgaattctaggaaatgtagacaatgaggaatatttgagaaagtttagaagtagaaagaacaagactctgattaaagaagctgattccagaaagattggaaaggtttcaagaaggagggcaaggttggccatgttgcccaccttcagagctagaaccagattacctagctaactttgtctatgacttaagaaatgaactgggatagaaattaaaacatgcaataatatatttagcatttatttgttgcactgtaaaattccctaaaggttataaagaaaaaaaatatacgtatacatatatatgtatatgtgcatatttcaccgatttttaagcatattatataacatgaaagatttcttacttaaaattatgaagtagcaaatgaagtctggatcctagctcattacagatatttcaggattggatttaatttatcatcttttttcccttttgaactgggaacaatgccctgatgatctatttggagaagagatatgatagtatcttacgtgacctgtgcttgctctattctgtttgctgtttcctgtttaattctgatggtgttgtggataagtgagatgaccttccctggagcaatttatgaaagcactgttgaatagagaacagaacatggtggaatattcatgggcgacttcagtagttcaggattactctcagaccgaattattcttcggagctttgctgagggcttagagtaccctaggcaatataaacgtttctttgatatgctcctcagtatttcttctttttaaagaatccccaagaggatttgcacctgaaactgtagctagtgccattcttttttgctctcctttttctcctcccttctttctaacaattcaaaatgttgatggtgtttttttggggggagagagatggcaaaaagtgtccattggaatttataggcatgtaggagaaaactgctttcccatacaacattatgatgccaacactcagttgtcattttgggggattgtttttgaactgaaggaaaatgtgtagcagcactattggataaatcagcaatcctggctcacctgtatctttcaaggaaaggaaggcttggtgacagtgttgagggctgtggtagtcacaataacagccactcaaaaatgtctctggaacccatgaatatattttgacaaggggggaataagttcatcaatcaactgaatatgagatggggagattaccctggattatctgggtgggcccagtgtaatcacaagggtcctcaagatggaagaatgaggcaatagagtaagtgtcagagtgacgcagcatgagaaagtcaagcatcacccagtcattgctggctttgaagacagaggaaggggccatgagccaaggaataaggacggcccttggaagccagaaaaagcaggaaaatagattctcctctggagcctcccagaaactaatgcagccctgttgattaggccaaaaagatcccttcttggcctctgatatccataactgtaagatcataaatttctattcttttctcactaggttttccattaggtagttacaatagcaacaggaaaccaatataggagctttctgaagagcctgacagttgtaagctgtaagaatctggagatcaggtagtctatatttgtaaaataagtgatattaaacattttagaagtggtttgcaactctcaggcaagtcatcattgagttcaataagactctagagaaagaggtagcaactaaacataatagaaaacccatcaaggtctatacacgtagagtaaatgaaggagactagcctggttggaagagaatagaggggcaggggagtgtggctgaccagagagtacatggccagctcctcatggtgattgttgccgtgaggaaatgtgaccacttttgctagatctagttttttcaaaagatgcccgcattttgaaatgtaatgtaaattatcctaatatttaactctagacaatttaagtaaaaaccaacaaccaaccaaatgaacctcaacacaggacgggtatggcccgtgggccaccagtctgagacagctaatctagaattgcagtcagccggagtgacttgtattttcacggttctgagtgtaacacccacagttccactttagagttgaagaaactgacgtaggggagttaataattgagctagtcaatggtaaacataaggtttcaaattgcggtgtgtctgattgtgaacgccaagtttttttccatctcactgcctctaaggcaaaggaggagattaataatggagagataaaaggagaaatggaaggaaagagtttaatatttactaagcacaaaatatctaccaggcattgaaccagggattttaagcacattatcctttaagtctcacaacaattttaagaggtaagaaatattctaattttccagggaagaaacctgagtccgggagaggtcaagtaacttgtacttggtcacacagagagtacgtgtcaaaggaaactcaaaagaacacattttctcagtgattacaggttttagagaagaggaacaatgcttcctctgagcctgaagaaaagaatgaaataagggctgcaagggaacatgcaggtttcacactacaggagcttgtctgtcttggtgcaagtgggaggtaaggctatctggtaagcttaagaatagtttataagggggaagcaggtgtcagactggatattgcaggagaaaagaggctgccaccagggtgacctgtacaggagatggagacatgatttggaatcaattggtggaccattgagaaaggccaacagacaggaaggctttgagtggaaagaatgtacagacccttgcttctttcctcagcattccttgcaggtggtaaccagagaggagctgagtgccaggactggccattggcttggtaaaagttgaaaccttaagaaagcagggtggctcaacttcattagccagcaggaaatgcaaatgaaatctacagtaccacatcaataccatctgacatccatcaggatggctaaaataaaaaagactgacaatgctgtgtgttgtgagacggtggggcagctggtatgctcctagactgctggtgagagtgtaaatgggtagattcagtatctatgaaaaccattttcagtatctacgaaggctgaacctatgtaatatcctatagcctagcaattccgtttttatagtccagtggaaatgtgtacatttctgtactgaaagacatatgcatatagtagcattatttataatggtgaaaaatgcaaacaactcactaatgtttggtgtactgacaaaatgaaacacgcagtagcaataaagaagaatgagcttcaatacatacaatatggatgaatctaaaaaataaaatgttgatcaaagcatccagatacaaaagagtgcatgccatgatttcatttacataaagcttagaatcagagctctggtgttagaagtcagaatggtggttatatttcaggggagaaggtgcctgagatagaacataagtgggcttctagggtcctgcaatgttctaattttttaaattttattacctgactgtgttcactttgtgaaaatccactgcctttatgatttgtgtactttctgtgcatatattatatttcaatagagaattaagataaaaaaatataaggcccaggttggagtctaggattgtgacagggcagtgttgaaattgttgacaagtgcagctaggaaaaaaaggctgagttgtttaatgcatctccgattatattgggtaaagggagctgggggaaattagggacacaacgatggtgacaggagaaagagaatcaccacatggcggactgaacggggagcagcatcttgctgtgacaaagtccaccatgtacctgtcatgggaatgatgatacaatattacatcagctgcatggctatatctaatcctgtttcagaagacgtcagcaaaggccattcgcgtagtgcaacctgggaaggagttggttgtttaaggtggatacagagtagatcctgatagctcacttcttgaccttgtttaatttttgcctgttagttcagcactagaactctgtacaaaaaaatttaaggctgcaatatcattttaatcaaatcatatgcaatgaaaacaaagcttttgctagagttgtgagctcacatatggtttctcctggtttgtggtctcctagggagagaaatgcagcaggttgatgataatgtgaacagctaagttccctgggtggctttaaagggaaagggacaattcactcattttgtgtatttactaaaatcgccttctctctctcagtttctctctccttccctctctctctctcattttctctctccctccctctctcttacacacaagtgggcatgcacgcacgcacacacacacacacacatatacacaaaactagatttgggatccttgttttagtaatgactaatcactatctgggtatcttggttaaaatagaaaggccatttgtctcatgaatcaaaggttaaaaaatgttcttaaaggattaatttccaaaattgctttcaaatagcgtggctgaccagcttttagcagtcatcgttaatgagaatgatggaaaattaaggtcaggtttgcattttctttcttcttattacttccttctcttctaggttgatttgtattcttgcctttccttatatattgcttatcttcccacaaatttcatgaagataatttttaagtaagtttcatttctaatttttccttagttccagagattctgttgaatgtagtcgatgatatgttgttacaacacctctaatgaattataaatagtccattatatagcgcataccaaagagaccttctgattgaacatgcaagttggggccttttaagaacgaaagggggtgctatgaacaccagggcaatggctgtgaaccagcactacttgggcaaactgggatgtatgggtactctacccagaggcctctggggcaggagctggccttgtgaaggctctgtcctgttaggggagctgctttctggcctagccactctggactgagtaaattcacaggtgttcactcagctaggttttctctctgtgataaatcctgcaggggttctctaatttaggactttacagaggcactaattgaaaaaaaatgaaactaatgctaggaatgctcatgataaggcctaattacaaatgacatctgtggatactacatgaaaggttttggatatgatttaccagttctttcttactaagagtctggttaaaaactcatgaatgaatatcactcacagaatgacctcgattcacgtctggtctgatttttttttgtgtgtgcatgttgacttctcatgtgagctttgttcctgcagaccccacacttagtcttatatggtcttcgtcctactctgccttgttctggggtgtggctttcatatgttggggtcttatgaatagaagcagacaagcctcaatctcattaaacacaaggtttttgttggtttttctaaaggcaaggtaaggaagtccctatgacatggaccatggtgcgcatgctcctcgtggcttgtccctgggcctggctcatgaggtttcactcccactcaacccctgtctgcatcccgcctctctctgccttggtgctctggtcagttgactcactgttctgtcctgtgcactctgttcctagctgtgggagttattgggtattgaagaggcttaatgcctgcctcatctttctgtgggttctgaacccatggggaaataaagacgtggaagtcagaagaggatcaaaatgtcctctctgctaatggtaccccttgttctggtggcggtttccctgggctgcccaccattcccctctgtgctgaactcacctcttcagtcacaaacaaagcagcagcacctgccctggtggcttcaaacaaggaggacagaaaaacatctgtgctgtcaggctggtggccagagtggagggagagtggaaaaggggaggaagacaggtaagaagagaaaaaaaaaggcatagaaagcaggagaggagagaggaagacagacagggtgagggagagtggggttcaaacaagcagaacacagaggagagaaggagtgggacagcaagaaactgagagaggctgccagcaccatggctgggttatgggtgtgtaatgaaatatttgaaatattagtccattctcacactgctataaagacatacctgagacagggtattttattaagaaaagaggtttaattggctcatggttctgcgggctgtccaggcttctgcttctggggaggcctcaggaaacttacaatcatagtggaaggcaaggggaagcaggcacatcttcacttggatggagcaggaagaagagagagagaagggggagctggtacacactttcaacaaccaagtcttctgagaagtctatcacgagaactgcaagggggacatcccgcccccatgatgcaatcacattccaccaggcccctcctctaacactggggattacaattcaacatgagatttgggtggggacatagagccaaaccgtatcagaattttctcaaggatcaaataattccctcttctggccctcacggaaaatgaatgaatgctagagcaaaggaaagcactgctttctcaataccaacaggtgttgatggtaattcctgtttcatgcattaaagcaaaatgtggccagagggagaaaagggtccccctaacccccacatcctgccaacctccctgccccagaacacaggtcacgatattcccagtgaaacttaatatcgtgactgccagaatgttactattcagccatttcatgcacagtgccctaggggttgcaatggcattcctagacaactgcaatgcctttctaacattgttgctgaggaatgtgaagccacatcgttgttacctgtaaactgcagaacacaagccttctgtctgcaggaggagggtacgacttttcctattttaaataaagaaaacttatcgttgttattttataaaatgggtaagtttatgagcataatggagatctgttctttgaaatatttgcagcttggacaaaaccagggaattgtagagcatcaaaaacatttcaatgaatcacaataaatctccttctccataatgcttctttcatattcactgtctataagatctgaaaaagaacgctcagtaatgacgtacagaatgtgctttctctggagagggcagggcagaacaggacaggtcagggctggacaggacaggcagctatttcagtccaaggggaagcaggggatcatgttagagtctggggacttagccctggtgattcctccaaaagagtcataggagcacttgagctgtgtccttctgatgggctcagaaaaaattaatttagtattcagtgcttattcttcagattcaaatagtacagaagactataatgacaagcatactgagccagggcatcaggactcccactggaaggcccagagtagccaggtcccagcaggagggagaaacatgaaattgaactgtgagataggacaggagaaatttcagattagtatgactgggcagcttgtggaaactcatattctattaaggagtaggaaagatgacctagtttgggctattaggatgaaaaaaaagaaaagaaaatgttttttcaaagtttccatttggtgtataatttttttttttttttgatatggagtttcgctcttgttgtccacgctggagtgcaatggcgtgatctcagctcactgcaacctccacctcctcctgggttcaagtgattctcctgcctcagtctcctgagtagctgggattacaggcatgcaccaccatgcctggctaattttgtatttttagtagagatggggtttctacatgttggtcaggctggtctcgaactcctgactccaggtgatctgcccacctcgccctcccaaagtgctgagattacaggcatgagccaccatgcctggccgttgtagaaattttattgacaaaaaattcttcttgtaaattgctttttatctcccaacaacaacaaaaaaaaattggttctccaaagagactgtgtatccacccacccggaaggcatgttcaccaggacagagtgatctcaaagattaggatgagtggttggagcttggatttaattttctcctctcttggtctggtgtgacactcacttatttccctttttcaaaagttctagaatctgtttcatttaagagattaaaaaacaagtaactgataaaaaaattcagatattcatgcccttttaatctcttgacttgccaggtaaatctcctggttgaatttcatgtgcatgtttatttcatttgcatgaagtttaaattctcccagggctgtacngctgcaactatttttgcagattcttcactgcacaagttggctgggctgcagggggtgagtaagtgcagaacggcagccacacttggcttggccaagccatgcagtgtgatgtgagtctgtgccagcccagagggagggatatctttttctctttcacacaaagggctagtaagtggccttgattgccactaaggttcattgacatcatggctaccctgagatgtgcctggtacagtgcttcatgcacattgttatctggtaaatgcttttgatgatggtcctacatatatttcaattcagtgggaacattatatgtgttttacttagggagaacttcaccccaagtgccttatgcttgaaacaatagtggtgttttagcctttgaagacacttggtgtatgatctgactttcttcttctcttgatctttggggcagttatacttgagggtaaataggcctcaaattgcttggtgtcctacaaataaacataaagagcttagcttagatataaaaaccctgagaaatggggaaaaaaagcatgctatctgcacaaacaaggggaaaggcagtaggcaggaacaggatggaagtccatggaagatgctgtgattcctttcctgctcagctcctcaagtcctggttcttgttttgttgaagaacaagcagaaatagtgggatttgggatttagagttctggaaatggccagatttttttttttttttttttgagacagagtcttactctgtcacccaggctggagcataggggcatgatcttggctcactgcaacctctgcctcctgggttaaagcaattctcctgcctcagcctcccgagtagctgggattataggcatgtgccatcatgcacgaataatttttgtatttttagtagagatggggtttcaccatgttggccaggctggtctctaactcctgaactcaggtaacccacccgcctcagcctcccaaaatgctgagattacgggggtgagccaccacgcctggccgaaatggccagattcttagatggcctgaactatgtaagtctgttgtttgatttggttaatctgaggaatacaaagttcaagaaatgttgtaatctcagcgcccttggtacaagagtgcctgctctaagcctttgctgttcagggaaacttgataatttaggtgtgatatatttatctatctattgattcatccatccatctatttatctgtgctatttctttagtaccaaaaaaggcttgcttgcacaggttgggcaggtgttgtaaatgaatgatgcagagagagatttaaaaaaccgtaaggagtggtagggacttgacaaatagagtatttccctatttatagggagtggccactgtcaatcttgggattcttgtcttgcagaaaggcaaacatgcagctttaggggggtccatatcttctgacatttcaaaaggagctggaaatcaagatgtgaaatcagattatttaatattgacaattaattcaaatgtttgtgctaacattgcaagacttctcctcatgttgttgcatgccaagatggagaaaatatgttgggcacgttaggtatttatgtgtcagtttgtgacctctgctctggtatataagtttgcccttagaaatatgttcctgtattattttaaagttgagtgggaagcttctctacttttaatgagttttaaaggagagatgtcatctacttatccctctatcatttggaggataggctagttatgtcacttggattatacaaataaacattgttgtgggttatttaaaaaaaatttattttctgaagcgagtctatcaaggtttttaaaatgtggttcttcatggacttccaaggaggtttaggattggcagtgaaaagaaagagaagaatgggaaggacacttacatttctgcttcttgggatagaggtaatctgtatattttggttttaaaaacagatatttaatcttttaggcacattaatctacatttctaagaagaaataggaaacttcttgatagaaatgccacctgttttaacgactaagcaccaatggcactctgccaagttgaaaacaaatctaggtaaatttaaattgggctggcatttcacagaactggtgcaagcatggttcataaagtttatttttttgcttgagaaaaaaatgacattttactgattctgtgtaagaaaacctttaagtttttatcaaagactattaagatcagaattcaatattttatgatagtatttaatattttacaatgtattaatttacaattaaataagttatttaatacaaataacttaatattttacaatagagttgattatttttctaatgctttcctaaagaaattctgtaaagatccacataattgctagaccagtgataaagcatgtaatttcccctatcttcaatttttccttactgtctaccctctaaagtagttgacaatgatcttctgatagatcctggcttgggtaatacattacactggcagagtaagaattcagaaaatagctcaacaggatccctcagtttggctggtctttctgaaaagacaagtgtgagcagcctgaggagaacctggaactcaggtattctctgtttcaaactcaggaaggcctgggtgaattcctggtagagctggtagaactagctttctattatgaatattgagaagtttgaccaattttatcaggcttctggagtgatatttgcatagttacaacttaatatcacttttctacttaacactcaccagtaacttccacctacttgggccagcccatgtagttcaaggtaaagatcttggattttattccacataaggtaaagatcttgagctacaagatcttgaactactgaagctcttgaattacacgggctggcctctgcctttctctccaacatcatctccagtgacactggccttctttctcttcttcaaatagactaagctctttctcacttcaagctctttgttgaacctgctagtccctgtttctatatggctctttctccagatcattggcttcttttcatttgggtctcaagtcaaatatgaccttcttagagaggtctcctctggtgatgccacttctcctatcacagtatcccatcactctgttttattttcttcatagcccttatttgaacttatcttacttattatttgcctctcattaaaatgtaagccttgtgaaagcagtaccttctctgttgtactttattgctatattttcagaatcaaggacagtatctggcatgaagtgagtgctcaaaagtatttgttagatggacgaattacaatttgcccacattcagtggctttacttgtaatctgtttgactcttgattggtatgtaattttattatatggaagggatggaaagaatagggttcgagggtagtgaggaaatagtaaaagatggtactgttggaattagctacatgatttgagcagcaaattccaagtacggccttaaaacagaaaaagaagcaaatatatactacttgaaagtcagactgtatgataatctaatggtagatatagttatataaatcatacacactcaaagctttacctctataattctgataagaatgggaaggctgatgacatttttgcagaccattaaataaatgtagtgaacttctagtttgctttgagcctatctgcatggctgataaatgcttttccaatagaaagaagggaaaacatgcattcaaggtgataagcaaccggtgataagcacagctagagacagtttttaaaccctgaaactctgtggttactcatataattgtttataagtggctcattgggaaccaaggtaaacagaattaatcttttaaacatcaaacagaaataaaataatatttctttttttttttttttcttgagatggagtcttgttcttcacccagggggctggagtgcagtggcatgatctcagctcactgcaactttcacttcccaggttcaagcgattcttctgcctcagcctcctgagtagctgggactacaaatgcctgccgccatacctggctaatttttgtatttttagtagagatggagttttgccatgttggcccaggctggtctcaaactcctgaccttaggtgatccacccacctcagtctcccaaagtgctgggattacaggcgtgagccactgtgcctagccagaaataaaataatatttcttatctgtaccctaagacatgttggacaggagatgtcccatgaagctgatgaaattttaactaatgcagtaaataatccattgagatttaatcctcatcaatcatcatccttattgttaccatgtggcagaaaaatgtgaaattctgttaaatgcttcatcttgatggaaaaatatgaaatccttgtaaataaagcttgaaattctcaggttcccaaaagatgactcatctgaccttctactcatctttttaagacatgaaacaaaagaaagcaaatgggtttctgtggccaaaagaatttcatcaacaccagtccatgggaacagatcagacatagggaaggtgggtctcatgacactttttggtttatttcacatctcttgagcagagctctcagtataatctcctcaacaagaatgtgtattgcatttctgtaggacataaattgccttctctcctcactattcccagcactgattacaagcttcagcagaaagcagagttttaaattcttgtggaattaataaatagataagagtaaaggtatttagggggagacaaggacatagcctgtaatttaggtgagcaaaatcagtaactgtgagtctgggctgtgacatggtcctggctcactattatttttttacaagttttaggatcttggcgttttatttgctttatcaattactgtggactaagatgtgcgactgtgatgtggattaaacaacaacaatttatttcttgctcatgctgtctgtccattgtgggtcagctgagtgctctgttcattcttgtcactcaggcatgggttgatggagcatccaccatctcaaacgttgttaattaccatgcttgggaagaaaggaaactctaaaggatgttaccccaggtggttaaataagctcatgtagaaatggaatgtgacacttcaactcaaaactcattgaacagaactcagtgtgcctggccccaccaaaaccatccacaagggagggcagaaagtctaattgtgaacagaactaatgatatttacttagtatttgtctgcttgatttttggcacagactgatttattagagtggagaaggtaagctgattatcaaagaatgtcttattttcctcatgtagttaccattgatttattgaatcatgatttcattctttaatatattttgcatcaatgattgattaattttcacagctacatcaagtaactaattattgatttactaatcaattattaaattctacaaattaaataatattacaaactaaattcaatccttgaatgtatccaacatttattgggaaccagtccatgggaacagatcagacatagggaaggtgggtctcatgtgcttgatcatctactatgtgcttgatcactatgctagatactacattgtatggctttgctgaattattgttaagtcttcactcacttagctgagctcagaaatgaatacatctcaatgcatgcagagaaggttcttattgaggcttactcactttgtagggtgttggtggcgtttgagattgtgttttcaaagtgcttagcactggcgatagtgatgttcataatgatgttgcaagttgactaggatttgatagttcatttcctaaaataatttttattcaactaataattcaagtaaacactgctcacttgatgattagtcgtggagtgaagactgcgttgtgaagctcaccattcattctctaacagtggtctcctgagttgggacacttacataggatttatttctgatgataacaagagcacagatgccaaccatgcatgtgatagtttctgggagaagacttgatgattcagcactgtccctataaaatgacaaaagaagacccacatatagcattaggtatggatgaaggtacttaaatttaagcttaattaggtgtaaatccttaactcctatattctactctctggtgctttgaagttggcctcttcggtctccagccacagaagggattttcttcgctgaccacagttccccacgttttcccttcagtaaatagcagatgtgtgtggtggtaagctggttttctgccattgctgtgtgaaaaggcagatattctgaatgaggattgtaagttatttttgtgttacacattcttctttagcttttttcaaaagcaattgcattttagttgaatgtgaaaatttactcttgatgattttctcagattaatgctgtcatcatgttaatggggtaatgcttccttctgcaaagatcttggaatttagggcttctggtcagtgttttacagctttgtctgagaaagaatgtaatatgagtatgtttttggtacatgacttcaaaaagccaagtctgctttgcctgatttttgtgtgagcaatcccacctgtctgatctcacccctgctcccaggtcacagatagaggagaccttgtgccctagcaacaaatcacatccactttagctctatggggacatttcaacaacaaggttcttgttgnggcttacccactttgtagggtattggcggtgttcgagattgtgttttcaaagtgcttagcactggcacagtgctgcaacttgcagcataattatgaaataccttaacaaaaggtatttacaaaagcatgagaggatgaatgtgaggaaggagcatgtcatgttgggtaagaaaatatggcactagaaacatgggagaaggngtgtgttttgtgggggtagatggataagaaagagaacagntggatcagacaccaatttaccaaatgattccataatattagtgcacagataatgcacagatagtgtgcaacaacagctttgggaaaggcaaactgactgtctataaaggtcagaagacattttataagatgtgttttactgaaagtgttgtccttgtgaagaggttttgagcaaatattttaagaagtctttagggaacaagcaattttcctttttgttgccctttctaagaataagacataaataggaagttccatccttttatttgttctattcaaatatttataggggaaaatcggctactacttctttataagacccacctttgaaactcattatttttccaaggtgccttgttcttataacaatattttcttctatgtttgtttatttatttattttattgagatggggtctcactctgacacctaggctggagtgcagtggtgcgatcccagctcactgtagcctctacctccggggctcaagtgatcctcccacctcagcttcctgagtagctgggatcacaggcttgtgccaccatgcccggccaattttttgtgtttttggtggagatggggttttgtcatgttgcccaggctggtctcgaactcctgaactctagcaatcagccctccttggcctctcaaagtgctgggantacaggcgtgagccacagtgccctgcctataacaatataacaatattctgtttaggctatggaagaccacatatattcttacttaagcacttagaatggaagccacctgaagacagaggttatatcttcacccttgtcacccacacataataagtgcccaattgatgtcttttgattaattaaatgaattaattagtgaatgaagacagacctaggactcctgatagaaaaagaataaaaacttgcttctgtttgtccttctacagtgaaaagatttcctaaatatcacatataataccagcacacatatcttgtttgctagtgatttgatttcatttatgtctgttatttaaattcagggaaaaacataggtagttttttcttgtaatatctcaacactgaacttgaatgaaaccttattaaataatgcgcaaaattaactattatattttgctgctaaggggctttggcattttgctttggtaaattatgtcgctggtctggaagactcaggccctgggatgacaggcctatgtcacaatgggtgacatgggttgggaaagatggctggctgtcctgtaaagtgccttatgagtgtgaagccaaaggcagtgcttggtaccacccagggaatatctatcagaatgagatattttattggcttcacataccataccataacatgtctgatacagtcagccaaaacaagattatttatcaatgcctctgccagctacccaagatggttaagagaaccaaaagccaaatgcagtgatcaaaaagactgctgaagaagtaaaaggcaaaaggatgaagaaaaaccagccaggaacccatgttttgcttctatctcattccctgggaatcagcagtgtatgagcatctatctctatataatccgtcttctctgcaggcagaagggctactcccttactgcacctgagtcctcacattctcaaccacatcagtcactaggaagcggtcaagggaacaccacagtatagcagagtggtcaaatctgcaggctctgttgccagactgcctgggttccccttccttttctatcacttattaccttgatagttactaaaccctcagtgccacagggttttgatctataaaatagagaaagtaataaaaatgttatctcatagggttgtagtgaagattaaatgagatactgtgtacttactatgtattgtatggcttttgttaataaaggcagggtcaggacaactgcatatatgtggtaagtggagatgtgaaatatgtataactggccacctaagttcagtatttgaggatgtatgagaaacgctagttgaataaaaacatattattattacttgtgttgttaccattactactgatgttattaccaagcagatgttaaaaatatttctatatgcactatggatcctacttcacttatgaggagaataatataacccaaagcttttaattctcattgcttcagtctttcaaatgtttttgttctcaactttactgagaggtagcagaagccaaaagatagaaatctagtaaaaattccaagtagaaagacataaaagtttagtctttgaaatgcagttggtctggcataaaaaataaaaatcaggctctagtcccaggataagataattttttaatgagttgaaattgtagctaatagaaagttgaatatacagataaatgaattgaaagaaggcatggcatggtttattcataacagatgttaaaagagtaagagtgattttttttttacaaagacaactcagaaaataagccagagagtttaaaagtgaattcactgcacagcttggttctgcattcataaatacaatgaagctcaaaaaattatttagtagcagaggcttatgagaagagcttggttctgtggagcagcaacatgataaagttagatttttggggcctcacctaacctgtgggacagctctcgggcctctgatttcaattattccctgcttttttttttttggtattgctgcaacacatctgtctcctggtaccctctccttgccctttctgtctgctttccactgggattgaaatgcttttctttcctccacctctgtttctagttgcagtatttttctttatcaagctcattttttccctaacctgtaaaaacatcaccagtgaatttatgacattggagctagtagctgtgttgatggacgtgagtgtccagttccatagctgcatgccagatgaatagcagtaatagagctacagaggccctgccagcacagccagacatgatgcactaacatgccagtttccttgcttctggtgcttccaagccatggggcccctggtgatatataccgttaatcaaacaagtgtgatgaaagctaaatgaagcaaatttagtgtgtggcatcaatatcaacatcatttatttactcactcattttggttcacttgaatattcagtactatttttccaatagtaaatgatgagaaaataactttttaaagtggggggaaaagaaggaaaactagtaaatttctcaaaagaaataaattagaagaaggttgaagccatgtcaaatggcttcaattcagacatttttaatcataggtagatattggtgtagccagagaaaaacacagtattcataaaaattatcattcagatgtgaatatgctgatagtaatattactatctggatttctccagattcataaattatataaaaataacaactgcagcccaaggcagtctatttaaatgcgtgaggagtaaggcaaatggtattcggagaaaagcattgacaacttggttaggtaaaatgctacattttcatcttgataataaaatgttcaaggtaattattggggctgttcaataagcagagccagtgagaacataataatcactctgttttgtcagtgagaacactgttaatattaatgggaatgtaatgctgaagttcctggggattgataaaagggcagctctagatntgtgagactgacacgcggctctgggggttcctgaccagttaattatggaccccctgcagtttttttcactctcttgggagcattcccaggacccctcctgaggcatttcttactaaatgtgagagagaacttattttcaaattcctctgaattgagaaccagactagatgtagggataaagtgaagtacagttgatctttgancagcacaagtctggaatgtgtgggtctgcttatacttggattttcttctggctctgctacccctgagacagtaagaccaaccccttctcttcttcttcctcctgagcctactcaatgcaaagatgatgaggatgaagaccttttgaatgatatggttccacttaatatatagtaaatatattttcttttccttatgattttcttaataacattttctttcctctagcttactttattgtaagaatacagtatataatatatatataatatacaaaatacgtgttaattggctgtttatagtattgctcaacagtagcctattagtagttaagttttttgggagtcaaaagttatactcaaatttttgactacacgtgggttaatgcccccaacccccaccttgttcaagggtcagctgtagtagattaaaaggtttttcatgtctggaaagattctctattcctggactggttcaaggaacttagaggtcaatctgaattccaaggagtgaaggtactaatggtttgatatccaggtgtacatggccctctgccaggagactgtagggaaagtagattatcatcatccaacttgtccagttgtgcagccagatattcttgctgacaatgtgaatatttacctatgaatactagagtactagtctaatgtgcaacaagatacatttgcaaagtgcagggaaagtataatagtcaggtgaccaaaggtcacagtgaccttccttaggtttggtctcctgactattacaccttgacttgtttttactttttacaggatttttacagtgcagtagtggcacataatttcttgatcttgtgtgtttctgttacggtaaaaataaaaacaaatataaacagtaacaaagaaacagcttccaggaaacttattagttattcctcctatgttacatggcatttccataattctcatctgtattaagtttgctgtgggaatggcaatcatagtatatagcccttaccaccagcactgccttctcacatgatttattgcaaattggttatattggagagtggattctgccaaatgggtagcctaattagtagtcaaattgttgttttctctagtgatttattatcaagcgtattaatttcagtgtccaacagaatgaaataaatgtcttggactattttttcaatgacattaaaaaatgaaaactaacccagagaccaattacattgaaaaaaatttatttgagccagaaaaacgtccnagtactgggcaacatcccagactaaaaatggttcagaatgccccaacctccaattgtggtgacttagatttataaccagaaaacaggaaataacatatagagattaccttgttggtgcaattcaatgtttgccttatgtgggcataatttggcagctttcagcctgggaattgactgaggatttggctgctatgattggcggagaaacagttgcttggtaacaagggtatactcctagattacagcttgctatgtatggagactgctttgagccaaactttactaccaagtaaagaatctgctgtgtgccaaacttaactttaacacatctcagcattggtctgaaaatcagttcacagtatttgatagtgtgccttgccattttctgttacacactttgttccctgtatgaacttctgtttactttgcactatttctgtatctgctactttggaataaaagtagtcagtataacttaaataatgtttcttaaatagtcaaatgagagtgatgattcaaatatacctcctttcccccattttctttctaaattattcacctctaaggtaattataactaagtttcaaggtttgatttggaacatttttcatatttctgtcacttagttcatagatgttcatatttctactgtattatcttatcagttattaagattcttgggagagtatatatctttttataaagctttccagaatagttaccatgatgttcattcttataagtaagcattcatgcagtagctgcttaaatatgatcccgtgaatggtggtataaaaaacatagtggattagacactatgtgctctaggagatggaaattgaagaccctggcccagtgaatttctcagcaaatgttattggccgcctggtcaatatatagtgttgtatgcatataaagtatttggcacatacttattaatatattaatatgacacattaaaagtaaactattctgtgatatatgttatggattatctctcaacatccattccaatttcttactagtgtacccctggccctgtgaaagctggaaccatctcttagtcttccctggagataaggtactgaatccatgaaagtgctagtctgttgggggaattctgctcaccagaacccttgtgaagcatcctttagttgacatgagttcagaggtactgatttatgagatttagtaggtggaaggaaagcagagactaacttctgctatttcatctaccatgcagagggttatggggatatcttgttgctttgctttcagcactggcacaagtccagggcccatttgctagcagtgtgggtgttaagaggcaggatgtaaggtatcacctgtgctggtgaggaacacagtgaggagtgtatgatttgggagctgagagcagtagcagtggggtcagcagcttcctgattgggtggtcccaggatcaaagtggttagtgatccgctggcttccttgctggtgtttgctttctaactgtggcaaagcactgtggttatggaactggcagtgacccaaggtggcaggtagcttcctgatcccagaagaggcagcagttcctccagcagcccatttctgtggtgttgcttgggaactatttctgaaggctcaacttagatgtattcagccctccccagtgattctctaagccatttaattatatgtcttaaatgtttttcttcttaaaatagctacagtagattctgttatctttagttgagccataatcaatatcccattggaacacatgcttcctacatattgtttcaatgtcaagtcattgagcattatgttatttcatgganatttgtgggagtaccactagaaataatcacaaatataattataattgtgtctttttcaaatccatcacagaatatttacacgtactccatattttccctctaatcaatgagttacactggtgatatccccaggcccattaattttccttataaaatatcccttgaactgtactttgaagcccaacaaaattgagttgtttgagctataaaagcaagagcaggcagaaatgcagaatctccacaggaaatgttttgccttcagggtcctgtcattcaaactagagattgaaaataccaatattctagctaatgtctaaggctgcttatttctatggctgaaggcacagggccaattagaggccaaagcagtgggtcctatcaccaggtaagccatttagttttactctcttttgtggcctcagctttcgctcttggtcttacctcatcatactacctgcttttgagcagagagaaagtgtagaaaagtggcagaaaatactttctcaaaattctttagtaatgatgggtcaggagcatcatcttctagaaggactgtgcatcctagtcagtctccagagagaagagagaaatgcaaactgtccagtaactgtgagccatgctaagctgaatagacaggcaaaaaggaggctcactactgtgccttgggaggaaatttgtattatcagggagaatggtatgtattggttaaggtggaggtgtgatngaaacattttgagtatataggagaatttagttcacaataggagtttaaaaagataaaaaaggccaagtactgtggctcatacctgtaatcccagcactttggaaggccaaagcggagggttgacttgaggccaggagtttgaaaccaacctggacaacacagagagaccacatgtctacagaaaaaaaaaaaaaagccgggtgtggtggtggcacgcctgtagtcctagctactcaggaggctgaggtgggaggatcgcttgaccccaagagttcaaggctgtagtgagctgtgatcatgccactgcactctagcctgggtgatggaatgagaccctgtctctaaaaataaataaataaataaataaataaataaataaataaataaataaaataattaggtggaagaaagatgacccagcaaagtgagagactattcattgcttcataattatattcagctataataatactgattcctttccaaatagtgaattaaatacagacatacgtgtttattatgttaaaagaagtctgaaagtaggcagtttggggctggcatggcaattctgcaaggtcatcatggacccaatttccttcttgttctgttatccattttctaagcacatggctcacattctcaagatcaactcatgatccaagatagctgctaaagaactagatatcatctctgatttccagccagcagaaaagggagaagtactctccttccccagaggcccatgcaatatttcctcttacatctctttggccagaattttgtcacatggcctcactaagctgcaagggagcctgtaaatttaggctatttggccaagcagaaatatacctagcaaaaaaatgggattctgttatgaaaggagaagaagatgagtggatatttagtgggcaactctaatctctgccataaagtaggtgatctctgtcataagactgagctagacggggattatactatgctgttgttgactgtggccttttggctctgtgctgaggctttcttttctagggccacaaacggagtttctcacatttacttctggatgatccaggaaactaaactggttttcagagaatactgccaaaaatgcctgagcacatgctcagctctgtgagatcagcaacggcacctgagacctttttatctgcttgttgtagtttttaatccactgaaacaatagcaggtgtaagctggaattctttggcacacagcctctgaaccttggctcatgttctcagataaatgcctatagcagctgaagctcttgaaaaaaatttaagaggaggaaacagagtagggatctttttggggtcacagtctaggtgtttttagagccactcaaactcgaatcaagaccctttgattaccataaaaaatctaaaataagatgttttgtttggcccaaacagttttagaaaaaagtgagccaaatctgaaaattagtttatttcatatatattgaatagttaggccatttggccacacctgtcctgcatcctgcgtgttgacaacatcctgggactgagcaatagttgtcatccttaggtggggcctgcatttgctggcccccaaccatcgacgcatttctgatatcttgtgtttggcctacttttcactcattgaatgtaacctgctgaatacctgtaagcatctaggctgtgaccctttctgtggatggctcaggaggtaaccagtgcatgagaagtttctggcctacctcagttgctatcagggtgggcagagtatgtggagaactcctagcctggagagatgagaaaggatgtaggttaaagttgaggtcctagaagaaaagatcttgacaaggaaagcctgaaggcttgtccagtatgaggttgccaggagtcatctgtgggaagacacggaagtgcacctaggagcagctggtgtctcaagactgactgataggctcgaacctgagccatggtttacaaagctgacaccaggatgtaactatgggttgtagccaagttgttccaacacaggtggagtgaactcctgtggtattttgaagtgataattggctagggtaatattttcagggtgctggttctaacagatggtgctatttgaaatccttccctataatctccatgaatgactctgtaacctacttaggaggcttattcaagtggttcaaaacctaggcctgtattccaactggttggcaatctgttcattgatgttgttatctgaattcatgaagtgggcattacattgttttaaacaagaagtatacacaattgcttcccaatccactctcctctcaaaacatgtactgatacatgcatgtatatttttgccacccttaaaaattcactttgtaattactttaatgttaatgtagaaaagagacacgaaaacctcaaaaagatttaggatttaggatttacttacctgctatataaaaaaaatcagggtctatcagctctgttggaaagaatggcttgagaaaactctgctttcatcatttgaaacttttattttgggattgtgtttataaatttcagaaagagtcctcttaccttcttccagcccaagtaagtgattggattgacgtttgtattcatggactttggcttgaaatgaaatcttttaattctgccttagatagtaaatgccaacagtttaaagtggcatgattcgatctttaaatttgccctactgatgaatggtgcaaataggaaaaaggaaaataaaaagtatttgctaccttgagaaatacactcagtctctatttgattttccttagatgtgggggtctgtaattgtaagatctgtttttattcatcgtaactaggaaagcctcaacattttaattaacaatagtaatataaattacattagttttatttcagttagaatttttttctttcatgtatttaatacgaaaatatccatgcaagagttccttcagcttaagtcagatgtgttcagtggctggggcagtgcattaactatagtctgcatgtgagaaaaacagcaattggcttttcactagtatttgtcattgctctatcctaatgcattcaacattttcctattgtgctatgctccactgtatatcacattttacctatttgattccaaatttactttgtggtattaggttttaatttagtaatttacatacagcttggaaaagtgattccttgaagatattgctttgtatctacatgataattgacactatttgtattaatattaaaagcattaacctctttttcctagtggtccccaatttcattcttagcaaaataaaattacagattctgttttcaaagaaaatttgtatatgggatttctttccattccttatctaatgttaggatactgaagttaaagtatgcattttctgtttttatatattttgtctttaaaatatatgttcagttataaaagtaatatcaattccttaaataatttttgtaatatacaggcaagccgcaaaaaaagaacaaatattctagagttccatgaaagtcatcatattaaaaatgaaattttaagcagttggacttcacattatttcataagaattttcaactctaatgtatatataatgattctaccaagtgtgtcatagttcacttagctgtttcaaatatttttttctactaagactaattaatactgtgtggaatacttttatatatagaccatttccatacttgagttttttttaaaatttgagttctcagaggtagatttactggttcaagagacattttttaaacttaatattagtttgcagggagcaatccataaatccatgtttcctaatactctgcctggatttttttttctgtgtttggagcatcagatgagaagttgtgaggagaaacaatggaaaaagaagaaggaatcatagaatcattgctgagtgttgctccccaggttcttgtttgctaactgaaaggaatttgctggctgaagggaagacatgttgaacacttttattcaccctatattcaccctgaattctctccccatggccaagggacagtatcaagacttctgttgtttcactgagacaagtcaaattaagaaacacttgagtgtttattgtgtcctttgtagggcttatgggcatatacctcagcaaagtaggcgggcaataatttaggtcatgcccatttaatttcaaaggccagctttaatcttttgggctgattgtgattactccaaaaacggcagaaaacaactgagaagggaataccaggtccaggttacagttctatggaggttttgtgtaatcctgagttttcgctttgcaatttggcaccatgatagcttttgtattttctttcctctgttctactttttcccatcatggcaggtgaacttctcagtgtgcaaggaattatatgtagctgactcttccagggtatgagaggtgggctgaagctatcgggatagcagctggcttcagtagtgcttttagctgtctagacttgtgctttctcattgattttggtgtctgggcatgtcctttactttctaaatcatgtctgcatttaaatattttagaatattttatccagcattttttgttgtttttccccaaaactagtattttcaatatttctgtgagagaacagggagtcctttctagtatattgctggaaataaaatatgcaacctattctctacacaacagtcagggtgatcttttaaagtatactttagatcatgtcagtcccctacttaagaccttccacagcttttcattgctcttagattaaaagcaaaaccctttatgttttctacaaatgtctgcatgatctggctcctaagaatcttctttcttacccactctttctcctgctccttaacttccagccacactggccctctctgttttttgaactaatggagctcattcctgcttggggcctttgcacttgacattctttctgcccatgtcctggacacactggctcttatgcatcattcagttcacagcttaagtgtcctcctcagaaggacctaccctgtccaccctactgaaaatagcaaatttgctatcacccaatcattctaacccatcaccctgtttaattgtctgccttaaattgttttgtttgtctatttgttcacatgtttacaattcagaatataagctctgtaggagcaggaaactcttctctctagttcatcacttcaagcccattactaagaacaatgcattgtttgtggaatgaattaatgatttaaataattagcctatatagtgtcatttccaaagttggcagaatatcatcattggaattttgttcttaaggggaactgggttatagaaatgtgggaagaatacttaattagcattgaaaaacaatgctttactaaggaatcaaaatcatgaaatgtaagagcaaataggagtgtttatcccctttattccagactctattttatagatataaaaaccgagactctgggttgctgtgagtggctcagaccccacaattagtggcagagctgaggccaggggatgcacattctgattcctgcatcatggctgttgcttaatatctcaccatgagtcatggctactgcccagtagattgggcacaaccatgaatattagactggcaatttgctagagattttgcaaaaccatgggaaatggattgaacaaattttcctgtcatttttgtaagaggcagtaaataatggtaatttgagtattagagaacagcatctgaatactttttctaaaattctacaaggtgaacatagaaaattgtagctttcctttctgcctattgctttctgaatgtcaacagattgctttcttcagcttatgttagaatgtcaccagcaggacccacatctgacatgctctggactgtcagagccactcagcactaggagaactttccagttgaatttctcttaagaaggtcagtaggaataagataaacgaaaaacttattcatcattaccataatccttgtgaaagtggaaaagttcatcctggcaaattcaaaatcgattacaaactcatgcatgttgcatatgtatttttaaagatttttacaaacccaaataaaataagtagaagaaaacagtagtgataaatttaaagttcttaactgaatgagtagctttgaattttactcaacggatataagctttggttttttttataaaaaagaaaacaggtttgttaagagactatgaacatattttagaaatgcttcagtgattttatcatttaaatagaaatttggattattctggaaaacagtttgataatatgtttcaggcatttgaacatatttactctcctggcccagtaattgcagttttagaaatttatcctattttaggaatctagcctagagaaaaatctgaaattcagtcatcttggcataaggatggttgcagaaatactattaataataaaaagttgaatagtacctaatattcaagtagaggtataaataatttgtggcaggttcatttgctatagttttatgcaactatttaacaaatataagtaagattatttaaatgatgaaggaaaactctttcaatataatgttaattttttttttttttttggagagggaagagctcttttatttagtaattcctgacacattttagatgctcatcaaatagttaattttcttttcattgcttcttacttttctctccctttatttatttatttatttatttattattatactttacgttctagggtacatgtgcacaacatgcaggtttgttacatatgtatacatgtgccatgttggtgtgctgcacccattaactcgtcatttacattaggtatatctcctaatgttttccctctcccccttcccccaccccacgacaggccccagtgtgtgatgttccccttcctgtgtccaagtgttctcattgttcaattcccacctatgagtgagaatatgtggtgtttggttttttgttcttgcgatagtttgctgagaatgatggtttccagcttcatccatgtccctagaaaggacatgaactcacccttttttataatataatgttaattttttagagagtaagacctaaaactatatatacgtgtatgtaatacgtatatagtataatctcaactacataaaaaaagacaaaaaattaaaagattgcaaaaaaagtcaaagtattaataaatattatctctaggatttgaataattattgctattttctcctttatactcttcgtattttcactttttccacaatatgtctattattttaataatcagaaaatcaatataatttattttaaatcttggcagatgaacatagtgaatgaactatgtcaaaatgcggttggaattttgttgaacttctttacagaagactatatagatgagtgtttttctaaaaaatctttggatagataataagatcaattaaaattgagtaaattcatctgtttgcgtgtgtgtgtttaaactatttatctcttgtgtgctacttagctcctgtattgctttcgtaataagactgaggtagttggtgaaaatttgaacaattcttgcataaagattttattgcataggttataggataaaatgcaagagaaatgttttgtggaaagagtacttagtagagaatcagaaaggctttatgggtccttcattttggtcactgttatacctttgtctaatagaccattgatataactttctactctataagagattgatacctagttaaggaaggtcatgatatattcactttgttacaggaaatttaaggtgcccagaaaaaaaaaatcaagaaccaaaactaacgaatagagagctctattgttattgactgaagtataaacttagatcccttagcaaagcgaaactcacagtccatacaaaaccccttgctatgtccgttggagaaggattggcagcaagatagcaagtatgtggaggatcattgttcatgaagcaggggtagataggagccttttcatatacttctaaccttttttattgtctaacctattgttatgttgtctcattaagaagaggcaatataatgtagtggccaagaggtatgacttaagaatcactggactcaaaatttgccagtttataactctgtaatcctggacaaactactcccaattttctaatttggaaaatgtggatgataatggtccaaaaaaaaaaaaaagatgagtcatcttaagtatttgaaccagagagaatttaattggctatgcagctgagggaagagctgaaaagccaaatggggtcattaaacaacccgaatattagcaatagcaggaagcatccactaattctaatttgaagggacaatatgttggagacagtgttactgggtccacagactgaggtcactggaattatggtgtaactggaggaggcatgggagaaagctttttgatggtagagattctgctcaaggcacngagagaggagagaaatatcttggtgttcccatctttcgaccctccagtcttgtagccaaacacagccagaagtcaactgacaagggactctgcattgcctctctttaatacagagcagagaaggagaaaggtgaagaatggatgtgtgacaggcaacaattcctacctcagaggtattatgcctaaagcatttagaacagtgcctggaagatatgtgcttaatagacactaccattatcatcgtcatcatcatcatcattgttatcatcattggtgccatttgcagagtagcaacatctctttgtgaatgtactttacaggttggatgctatgagattgtttctaattacagcccttttccgggccctgctgtggtcaggttgctagtcatttcagcatttttagtgtttggtgaggcaggggtgttccaccttccattctcatctaccctgcgttgattacatttagagtcagcagacctagttcattgatgacaagaactgagccacgcaatgttctaaagaatccaggcagttttaggagcatgataaaaattcacaaccctgtgggaaatgacccttggaagttaactttaaaattaatgattttaaaattaggatttccttacatatcctagtccctttagagttgagcttagctttgtcctgcaaaactgaaagaatacatatttaatttttttggtattttctgtagcatggcattaaaattaataaatttaaaggaatagaagcttgacaagatgccttaataggcccaccaggaataatcacatagttgcctattttgaagcatagacataaaattaaaaaattccatccagataagtcacgaggctttgccaaagtgccctcttaaattgctccccttttgagaatgcactatttattgtagcattttgctgagcccttgggaatttctcttctgagagacttttaccagtatgaaaaatagcagcttttctaagttttggaatattgtcagtcttttttttttcattggttttccgattatcctattctcagaaataacatttattgatctcaaggagttaaacattgtcttgttttctctggttctgtattcttcacctttaagaccagatcccaactaagtaataataaaagataataatggctaagagtttttgagctttcctccacgtcagttattgttcccagcactttggtttcattctctcatttgatgtgatataggaacttgtaacaaccctatgagacaggtgcttcactttaaagactaagatactgacgcagaggttataaacctcccccacggtcacaaaatcatgctgctggactgagctcgcaccttccactactattaatacatggtaatgttgacatcttattgtaaatgttaaacaataaagcgtaaagggaaagaagtaaatgcaaaaaaatggtcaaagcaggagatgattttaaagagcatctggttcagtctccccttttacagctgagaaaaccaatctctagaaaaaagaaatgagccttttgattataaagcagactgcctaacaagtatcaagtcatctcacttattcttctctgtcttccatgatcacagagttctgaccatgtcctgtgtcactctcaagcagagattgaaaatgacattcgtcctttacttgttccaaggaagcaaacattttatagtttgaaactgtttctcttgcatttgctttgcaagaggtttgcagaagttaagcctcatggagtcttctctccttaacttaagtgagtggattgcttattgctcttctttgcctgtaaattcatgttgattagacagtggtggggtggagggctgatgggtctgtgtttggttggcaagctaactccagcatcctataattactacattttcaatctggtgcatagttctgagttttgtacatccttatgtggctctacactctttgaggttaattttggccttggatggtgcccttttaaaggcagggtaatagcaacacagtgtttttgcttgggaaacgctctgtgtatgggcttcttctcttggttttaagtattaacaaggtagtaagtatgaaaggtgctgtgtttggagtctttaaatggacttggcatttggcttgtctacaatctttcaggaattttaatcctgatattcagatttgagtcacacacctggggagtggtgaccatagctcttccttacccctccagctccacttctgggttagcatgaactgaccactgtaacctgctctcaggctctacacaaaggtgcttcagaatctgcctgtggccacttctgtgaaagggcatggtcacagtcaccgtggcatggatagaaaactggagagcagcaggaggagcccagggatagagagaggaggcctggatgcctgcctgggctctgtgccatgccttgggtaggccacttgactactttaaaccaagttgactctcctgtaatgcaataggggtttaatgatctctgtggctctagagttttgtagtttctactgttctttgaagcatgaacattaattcaacagaagaaaaaaaaaccaaacatttttcattcagaacagtttcaagatattgctctgactcactggatggcaaatcatagtgaaagggaagtctgactcgacttccattttgcattacttttggccagcatggctctttatggtgtacttgttgtataataaaacagctntctagagaatactcttacatttacttactgagagataacagaagttccgaataaaaactcatagaaatggaagactnggaaattatttttttcttttttctattacatacagaggaacaaaggctgatatttgtgtttatgcccctttctgaggacaatgtccttgaaaatccatattattattatttgtctttatatgtaattggattgtttaaactcttctctgaactttgtagctttttcattatatctcttttgctggaatattaataaaactccacttaaatagccactttattctgtaaattttatttaaggcctgaacttggccgcaaatgagagtacttgtggtttttttttttttttttttaaatgatgtgactgctttgtgaagggacataatgagtctgtgttctcttctattcctcttcaacaactttgtcaggaaagaaggctattatgatttcttggagatgtgggaggattgtggcatcaccatgtcctagtcatggatgaaagnagaaactattataccagggtaacatctgaggcctgagataaaattcccattacaatctctttaaatatttctgtgtttaaatgggatgagaagactatccactccacaaangtaatcccttttcttcctcagcctagtgaaacttattgtttcttttccctagataaaaaaaaaaaaaataggatgctgtacagnttcttttggcttgttaaaagacagataattcacagattttgcttttctgtagcttatgcaatgtctgaaaaggcgctgtaagcagggattccctgaacatngcgccgtgggcccggatccctgttttgctttcttcagagagctcactggcagcctccctgatgctttgtgccagtttttaggcgctccaaagccacatgcacattgacataatctccggtggttttggctggtttataatctggcttattgaggtttggttcaaggcagaggcctttagggcagggatcttctgtgagctgaaataaaagggtctggtttggaggagatttgactctgccaaataaaagcggcacatttccaactgcacatgctgagttgcctcggaacacatccatgcagaacacagacatgcattaggcagctagtttgtggaaggcagtgtgctgagcacaagggggaatagaaagacacatggctgccgtgaaataactgcttccagaaagcacatgtcgagttggaaggatgagccagaagacacacagagaatattactcagcctaaaatgtgacgtcccgaaagcgtgctagtatgagacccacagagttggagaagagattttctttccagtggggaaaatccaggttagaaagaccagacaggccatattaccggaggcaccctttatttcaagtttggctttttgtggtttcggttacctgcagtcaaccgtgtccnaaaatattgagtggaacatttaagagatacacaattcgtaagttttaatttgcattctgttctgagtagtgtgatgaaatttcatgccatcctgcctggggtgtgtagcatccctttgtccagcatgtccatgctgtccatgtgactcgcctggaggtcccttagtagccgtctcattagcagatccaccttcgaggtatggaagtgcttgtgttcaaggaactcttagtttacttaataatggcccaaagtgcaggagtggggatgctggcaatttgaatatccctaaagtgcttcctttaagctaaaaggtgaaagtttgaacctaataaggaaaaaaacaaaaattatatgctgaggttgccaaggtttatgctaaaaatgaatcttctatccatgaagatgtgaagagggaaaaagaaattcatgccagttttgctgttgcaccttgatctgcaaaggttatggccacagtgtgcaataagtgcttagctaagataaaaaaggcattgaatttgtgggcggaagacataaacagaaatgtgttctgattgaccgcaattaggtttggtactatcagtgcagtttcaggcctacactgggggtcctggaacatatgccctgcagataatgggggactgtcgtatagagcccctggatactaatggtgctagggattcaggcccctctcctattttgggaaggggcaacctcagcatataatttttgttctttccttattaggttcaaactttcaccttttagcttaaaggaagcactttagggatattcaaattgccagcatccccactcctgcactttgggccattattaagtaaactaagagttccttgaacacaagcacttccatacctcgaaggtggatctgccaaagagacggctactaagggacctccgggcgagtcacatggacatgtcgtgtgtatggaaccttggaaagaggctgtccttacctccctgtgcattctggcagcccctggcactgctcatagatagccatgtgactcaggctgggactctgactctagagcgaatgggttaaaggtcaagaggctgttagaacttattgttggtgtcagtggtggcgcccattggctttcagtggcggcggcagcagcagtgtcctggctgtaattcttgctacaggatagtggtcgtgattcttgctccttggcatcttgcgcgcctgggtttttgctcattttctgtccttagtgatgaagacttctactgagtctgaacctgcatgtccttccaatggagtctacttttttctcctccagctagccaaggccggtttctgttatggcaagcaagaattcccacagcacctgagtgtcaacggctttcatcgtttgtgctgacccacctgtgcagctgatcgtctgccttttttctccggctactcaccttcctttatctacctatataactccctgctttgaaggctgaactccagcatttttaacttttcctgagttattgaagagactttactgtttactattcctctgtacagtacaacatcttataattgcccattatacagattttttttacattgtatgtctttttttttattattatttgtttctgtttgcctactagcccatgaggaatgttttttggtaggaactctattttcatctttatagttccagatccagctaagattacactctggttgcgtgactgaacaaatctgtttgcagggagagatgtggtgttggaattgtgaacctatggagaatgaaaaaaatagaatagctgttgtgaggcatttactctggtgatactaagggaggaataaaatggtgtctgaaatgtgtgagggccgtctgataccgagtagtgtacatttattttccacttaaaaaagtctggtttatttaggtattatttatttacagtaaaatccatcccttttattgtagagttctataagttttgacagatgcatatagtcatgtgtataccaccagaattaatgtatagaacagtttgatcacctcccctcaaaagctctccctccttcttatagccagtgtctccccacatcttcagctcctggaaacaactgatctatgaattgatatgtgtgtntgtgtgtgtgtgtgtgtgtatatatatatatatatatatatatatatatatatatagtttgtttgtttgttttttgagacaaagtctctctctgttgcccaggcttgagtgcagcagcacaatctcagcttactacaacctctaccccccgggttcaagtgattctcctgcctcagcctcccaagtagctacgattataggtgcctgccaccatgcccagctaaattttttttttttttttttgtattttcagtagagacagggttcaccatgtcngccaggctggtctcaaactcctgacctcaggtgatccaccggccttggcatcccaaagtgctgagattacaagcataagccaccacatccagcctatcaatttatattttaagcagttatcatagttctacaactttccagaataatgttttatacaccaggaagataaaataattggatagtggatttttgtctaggaatagagttgctgaaattaggaaattaaaataacatgtatttatactaaaaattatccattacttatataaaattcagtgtaattgggcatcctgtattttatctggcaacccaacccaaccccactggatgggtattgccagtgtgggaactgttagaattgagggtaagtgtgaaattggcagacagagaaggaaactgcaagaagagancatggatcctatcaacagaatcattcagccattcagacactttgtgacaacctaaaaagagaggagggagtgagatttttgtatgaagtaagaattcacttgtttgtacatgaacagcatatgctagcctgctttgaagactgaagttcttggctttccagtttataaaccagttctatctgggcagcttgcagccaaattgtgttgtggaggaatgggactcaggaagcacgggcaccctgaaataggtggatgtggtctgtggaaaaggtggaagcacacactagggttctacccttaagaaaatgaacctttgctgagttatcaaagtgagtacttgctatttctcaggatagccatgccacaaacacatatttacagtaaaattcaagttggtaacaattaaaatgactgacctctagtttatctatatattattggaacaaaagggcttactgagcaatgccaaggaaagaaacttccaagtgggttcttcttactctacataaaagaataaactattttaaaagacttttggcaagtccactgtttatactaccataagtcttacctttctgttttaaagcaagcttggcaggacagttacttggaaataagttgtcagtgtttggtcggagtggtagcagttgtgtctggaattcttcattcttttcctcgctctccaataacctaccctgtgaggctgtctccaaccccagagccctgaccaagtgaccatgctgctaagctgcttgataatagtttaatatcagtaaagggacacaagtttaaaattatttgacatattagtgctatcagttaatgacttaaaaatagcatctttggtttctaggtgttgacaaagattctctaacttaccaaactttagccatgctcctctgaacccccttcttgactaggccttaacttcctatcacaactacagattctcaacaccaatgatttcatccactcgtgccccacattaaaagacttacacaaacactagaataatttctaacagctcaaggccacatccctaggactaccctaccccacttaggatgcctgcctgaggaagctcaaggttgccaggagagtttactatttcttctagccaacaccctggagctaggcccaaccaccctttcttagagcatttactaaaaagggcttacaattgtgaatccttgccctgtaacctttgataaatatatgcacttcctactgctcaagagtgtctttctcaaggacccaagagccattcttctaaaaagtaaccatcaggagagagagggcctctgtcttttggtatctgggcagatagaatcctaactcccataattgtctaatcaactttaatgttgaccaaccctttgtaatttttcactctctgacttcactgagcctgctctcaccccttcccttttctactctctcattcctcttctgaaatacacagtctcctctgtgcaaatcaaggttgagttcagttcacactgcactcccttccctattgcaatagcgtattagtggttcaaatctgtcctccccactttaactagtgtctggcttcctttatctctgacagtgtgaagaatttggaaattgcaaggagcatgggaaggagatgatttggggtaggcatcttttattttttaaatcacattgcatacaggtggctgtctcttctgctcatactcctagaacaggcctttggtgtattttgctatatataggagactgggactagaaggtcaccctgttcagctgttttcagactatcattaggttgtaaatggaatccattaaaaaattatatggaatgcacaaaataaagcaggtgaaggcaaaattactcttatggaaacaggggtaggaaatctagaatcgtatttattccttcttttctctttatacttatttggggagtcttagcctcattaagaacaactgggagggtaaaacacaagtttacaagaaaactagtttcctccctttcagagttctttccatcctggcagctgaatggactcagcagctctcgggggcagtggcttgagtgtgctgggcttgtgtctcctaaataggaaatactacccacaatgggataaaggacccacagggactctataactgggganttagaggacacatcttgtgtaattctggcagaagggctaggcatgaagtcagagcaggagatgactcagaaatcctgatgcttagagacattaccctgtggctactgggatcactgcgatgaactttgcctgaggtctgtaatgtgatttacaataattattctattcccttactcactagcttgacaagatgaacaagttaatgttattagcttctcaaattggaagatgataattattaggtgggtccattgggagtcaggctggggtgagttgttatcaaatcagaaggagttatcagtagggcactagtaatcaataatgattgaatgtgggctaccagaatttgccttttcatgatgtatacaggacttgtttacataaccangtcttcaagaagataaaattaggaagacatccagataacagaaatgtggagagaccttgatatcatattatgattgagaaagaaaaaacacatagacattgacattgggaaggaatgactacatccagttatggcagcaaagctgtgtgttgattgatattgtgagaatgaatcagtgattgggcactgtggctaggacagaaagggtgaccctgagagccacagtgcttttgtgtgtgacagccatgaagaaagcttatctggacttgatattgacccgttgtgtatttccgtattttttctctcttttctctccttttcctccactctttccctcttctctttcaacctcatgttgaaaaaaaacctgaagtttgcttgtggaaatgggtgagatttgtgagttatgatgaattggaattatttgcaatcaaatggaaagttgtaacaacaggtgtggatggatgcagctcacacataatgcatgtggtgaattgaggaagctggtagaagtttggggcgtgattgacaggtttaaatgtagcagaaatagagtagttgcttttggcattttagatttttaaataatactttgntcaggccacacattagttagtcagacacagagttggaaccatatttggaaccttcggagcctccacgtgggcttgttcatcgtccttatgttagggtgacaaggttcggagctaaaaccagagagagaaagccacagcagaagcctcttccagacccactgtgtcagttttgaactgaggcattttctgtccacagccatatgcagtgtgaacaggccacagatgtacatcaagtgagtgggtgaaataacgtttggtgggaaatgatgacagttttatggcattagtccttgaagccccaggtgcacttattcatctttaatatattttaagctgttagccttggggatatttcagcctgtttgcanctgtattttaaagatgagccctggagtgaatcagtgaggggagcgagtcatacctgaactaggagaagagatgaatgaatctttgtaggagaagagttaagtggatctagttatccctgaacaaggagaatatatcagggtaatgaagagacctagaggaaggtcatcgtttccttttaaccagccagctggttgaccttcctgcacctgccttagagccaaccttggcctgggcagcttgcaccaagctttgcatatgccccttggatgtcaggatgctatacctggattatcctggcacagagcatgaattataattcctgatctcagcatattctaccctttgacttctntgttagggattttgactcttctgcttctgacttttcgatgaatcatgtctccttgacagagagaaggctcttttttttaaaatgactcatagccatatctatatataaccactgagtgataaataactcatagccatagctacatatggccactgaattgagtgattaataattctgttgttataaatttgagtgaatatattttggtcaattatgtggttgtggctataaagatagctaataatctttattagaatttggatactgttgatttttttcttgtaattttataacttccatttccctgtggtacatatgcagtgtggaatactatgcagacataaaaacaataaaatcatgtcctttgtagcagcatggatgcagctggaacccattatcataaatgaattaatgtgaaaaacagaaaaccaaatntcccatcttttcacttattagtggtagctgcttataagtaactggacacacacagacataaagatggaaacaatagatactggggactccgaaaacagagagggaggggggcaagggctaaacaacttcctnttggatactatgttcactatctggacaacaggatcaatagaagcccaaaccttagcatcatgcagtgtatccctgtaacaaacctgcatatgtactcgctgaatctaaactttaaatttaaattnnaaaaaaaattcaatgtttggacttaggcttaaatttctagaactttttccacctctaagttgtcattatacaaagtatgtttaatagtagctggaagagttatttaaatccacacactaacagcaaccacagtgaatacggtttaggtaatattttcttttatccaacagctagagtgagatgcacagaacaatgaacaagcacctcaagaccttggacttgttagagattcagagtgagtttcaaagcaagaaaaggcaggaacatgagtagcattcctataaaatagctactgaagcagagtagctaaggaaagatgattgttgtagaaacacaatcagtgaaatagtctggtagaaagactattccttaaaattcttatactcccatagaatttacttctaaaccatactgcccttagacttgagcaanaatattccctgcccagcccngcatttcagaggatcctaattaaaccctcctcttgccttccccttccccacagggtgagcattctgtaagtccaagtaatcatatcccctaaccctcccatgtaagccatggtctgggtatctggactctagaatttcctgccagggtagtccaaaaccaagacacaggtctatccttcagggggaagtttgcnttccacacaaagggaggccaaggggcagggaatgtgaatgaatgagaaaccatggcgtccatacataagtttgcaaatctcagtgaaagaataagttggcatgaagagaaggaggggtaggagagagcctgggggccagcttcttctgaataagtaaattctggtgcagggcttttcttaggtgcgttgcatatgttacctcatttaatcctgcagaacacttcagggtagtgttctactgtcacattatgggacagggaaatgaggctcaggggagttaagtaacagacccaaggcaactgacttggtaagaagttgagctgagattaaaccttaggtgattgagctctaaagtgcatgtatttttctaccttgttatgctgcctgtgatcagtatctttgcttttataatttcccagttctttccagaacctagcctggtccttgcacttggtgacatgcaataaatatttgctgagtaactaacaaaacagaccatttattcacctttactagttatttattatttatgtatttattcacctttactattaatggtatatacaatacaacagtggtgtaggtgaggaatttcatgtcaaatatactgaaagggacagttcactcctgatccatctgtactggatggatgtgttgatctccctgtggccatgtagcttttgggcttatctctccatttgtcagtttagtaaattgctgcaaatgttctggctagcaaggactcaaatgtcccagaacaaacttttgctcaaagaaaatattaataaacaccatatatgcttctgtagtccaaaatgtttttcttttcttacttaaaaatggcacaaactctgagtattaaggtgattcaagaagttgtgagaatgcctgtttctcaggagttgattggcagggtccctctgttggtgcggccctgcttgtctgggctgtagttcttccatgtgtgtgggccacccatgctggctcctggantggtcagtgtgctgtcctggggcttggtctttccctccgctcacccccacttatcatggatgccaagaccattctctgctgttggcagaaagccatggaacatacttccctaattcctgctataggctcatttggtattttccccatgtgctcccatttgtacacttaattgtttgggcttatttgtctgtcttccttgctaaactgtaggctcatttgcgcacaggctttgtgtctctcttgtttaccattatatcatcacatctaacacaatgcctggtacatagaatacttaatgaatttttacagaatgacaatggactgccatcataattgagtcattaactactttttcaaaaaagttctagcattaaggtatcagatcaaagtttcctttcacaaaaatcttacattttcctctatactgtaattgtatctacctgcttggagactcaccaagagtgtagtcactgtgtaccctcccagagtgactttttttatctcatttagaactatttgttactgtgattctcttaagcaaatggttttgcccacgcagagctgtttgctcactgacacaggcttaactggttaaagaactcacaggttgtttctcaccattaatggctattatgttattttaccatcagttatacctcatttctgcttctatctttacaactgcaggctttggtcatttttaaagtcgttcaagtttagattgcattgacattaaatcaaatcatagaggacaaacaactatatattttcaccgagagtgggcacagtaaagagttcccaggctttctctccgacttttagataggtctttttcagaagcttcctatctccctaagaagtctgagagttattacaatttctttaccctttgcttacatatcccatcacatagaaaaccatttaatagaatctattgtagcagaggcagaactttacctctgctctcatagagtcccaggtagaactgatggtgaaattgacataaggtagattaataggtanattagtccattctcatgctgctaataaagacatacctgagactgggtaatgtataaaggaaagaggtttaattgactcacagttctgaaggtctgaggaggactcaggaaacctacaatcatggtggaaggggaagcaaacatgtccttctttacatggtggcagcaaggagaagtgctgagcgaagcaggggaagtgccctttgtaaaaccatcagatctcatgagaactcactcaccattataagaactgcatggaagtaaccccccacccatgattcaatgacctcctactgggtccctctcatgacacatggggattatgggaactacagtttaagatgagatttgggtggggacaccactaaaccacattaataggataaaagcatgtaagttttacataacacaggagccctcataaggaaatgaagacccaaacaagtggccaaacctaaatgcttttatacttggttgaacaaagagagacgactgtgaaaaagtaactaaattatgtgggaagactaaaggaagatcaataagaattattttaacaaggtctgtgtgtacagaattctcttagttgtgactccccatcaaagaatgtttcttttctcctggcagaaagacagcaactttcacatgtgagattttatctcctgttttcagggaaaaaagggaaaagattagggtgcgctttttgcatctgctgttattcaagtgcccttagttcaaactaatccttataccaaaatggcatattctggggtacatattctgccattcttcactactaaataacagaacatatgcttacctatgtactagctatttcatttctggtatgtgccaaacagaaacatatatgcatgagcccaaaaaaatctacaaaatctttataccagcattatttgtaataatccaaatggaaaacagtccaagtttccatcaacagaagaatgcatacctaaactgccatatagcaaatatatagtgaaatattatacagcaatgaaaatgaaacagtagttttactgctataggcaacaatatagatgaatataataaacataatgttgactaaatcaattaaaaaagagtacatactgaatgacttgattccatttgtataaagttcaaaaattggtcagataatattgccatttgggagataataactgggatcctgtctttttcccttggagagctagaagaatggactcttctcagaaaggtgaccaaaacttcataaaatctcctttccccagaacattattatttacttacctaggtgctgccaaccacaccccattgtgtccctttagtcattgtatggaaggaggtcaaatgccttagtctcccagtgactagagctagatatccagccatatgaacagtttgttaaaaccaggactctgaattctaatgcccaataaggagggttgtacttttgtgaaaataggctggtgacaattatctgaggtcagaggaaagattctgtcatcatcattgtcatgatcataattcttattttggtttctttactcatgtttttaaaaattatatttgtagaagctattatgttaggtttaatagaaatgtagaaaaaacataaaaatcatttgctcagtgtgatgaattttcatatactgaatatatccatgtaacttccacataaatgtttgcgatactcatctatattgttgcctgtaacagtaaaactactgtttcattttcattgctgtataatatttcactatatgtttgctatatggcagtttaggtatgcattcttctgttgatggaaacttggactgttttccatttggactattacaaataatgctggtagaaacatttttgtagatttgttttggctcgcacatacacgtttctgtttggcatataccagaaattaaatagctggtacataggtaagcatatgttctgttatttaatattgaaggatggcagaatatgcaccccagaatatgccattttggtataaggattagtttgaactaagggcacttgaataacagcagatgcaaaaagggcagtctaatcattttctttttcttccccctgaaaacaggagataaaaactcacatgtgaaagttgctctcctactaccaagagaaaagaaacattctttgacaaggagtcatagccagaagaatcctgtacacacagaccttgttaaaatattcttattgatcttcctttagtcttcacacgtaatttagttacttttccacaattgcctctctttgttcaaccaagtataacagcatttaggtttggccacttgtttgggtcttcatttccttatgagggctcctgtgtcatgtaaaagttatgtgcttttctcctattaatctatcttatgtcaatttcattatcaggtctacctgggactctaagagagcagaggtgaaattttgcctctgctacagtaggttctattaaacggttttctatggcatgggatatgtaagcaggggataaagaaattgtaataactctcagacttcttagggagttaggaagcttctgaaaaagacctatctaaaagtaggagagaaagcctgggaactttttactgtgtctacctcagtgaaaatacatagttgtttgtcctctataatttgatttaatgtcaatgcaatctaaacttgaacgactttaaaaatgaccgaagcctgcagttctaaagatagaagcagaagtaaggtataactgatggtaaaacaatataatatctgttaatagtgagaaacaatctgtgagttctttaaccagttaaacctgtgtcagtgagcgaatagctctgtgtgggcaaaaccatttgcttaagagaatcacagtaacaaatagtagttctaaatgagataaaaagtcataagaaacattatgtacctgatggaatgtttcaggtgaaattgggtcactcgactggttgttcatccttacttaattcttaaaattttctgatggcctaagagtgaaagtttctgaatttagctgatcatattttaggaaaaacacaggacaaaatttaagttgctgaattaaagtgtctagtgttatccctgatttttaggcaagtccttatacttatcttttacctttaaaggagagtcagagatacctagcagaatggttaaataaaaagtaatgacaagagcaaatgcttgcaaggttgtggagaaactgggccactcatacatggataatgggaatgtaaaatagtacaggcactctggaaaagagtttggcagtttcttaaaaaactaaacatgtaagtactacactatccagtaaatgcactcctgggcatttatcccagagaaataaagacttctgtgttcacagaaaaacctgtatgtaagtgtttatagcagtcttatttataatcgcctaaaactggaagcaacacagatgtccttcagtgggtgaatgattaaacaaactgtggtacatctacaccacggaatactactcagcaataaaagaaacaaactactgatacatacaatgatctagatgaatcttgagagaattatgctgaatggaaaaagccaatccccaagggttgcatactatatgattcaaattatataacattgttgaaatgacaaaattatgaaatggaaaacagattagtgtagattagtagttgctagggattaagaagggaaggaataggaggaaactgggtgtggctattagaggggcaacatgggagatcctgctgataatggaactgttttatatcttgaccatatcaatgtcaatatattggttgtgatattattaccatgggggaaaactgggtaaaagatacactgattttgtattattttttataactgcatgtgaatctacaattatctcaaaataaaaaaataaaaaataaagtacaagagagtcagggaaagttctatgtagtttctcttagatcagtttttattttttaaacagttacccatccgtttcttaaatcttatggattgttattaaaggaaggccactgcctctgctttccattaaggacaatatcaatcatcaaagacatctacaaagtttctgaaattcttcatgcagactttcaggggaccattagatcatattattttacctgtagggatatatacaatcaggcacaaatcttagatctttaagaagcagtatagctgaactgctgcttaaataagtgggaggttggttgaggttattttccccctataattgcttttcttctgtcccagaagaacctgtcagaccagtcattaagctattgtttagttctcatttggcttaggtggttcagggatcagcttagggaataatagaggcaatgtaatgaatcttagtgggaataaagtgattgagaattttggtttgtttttaaggcttagaatataatatccattctctagttccatgactgccccaatgcaattctttttgaaatgctgtaacttatagcctggggagcctcaccatgttcttttagttttttcctcttctatgtcattgtgcacaggatcttccagcttttgggttaccatgtctttgagttttctagtctgaataagatctctttagaaatcatatttttctgagagctatagttgactatactttgttttctgttgtttcataggattatctcacaaatcctacggtgaaaccatatgaggttcacagtaaccatatgaggcgtaggtattatcacctccattttatacagacttaaggaagctaagtaatttgtccctggtcatgtatgtgacagaaccagaatttgagttcagaaagctaacttcacagtctacacagttagcctctctttatttttgtttttgtctttgttttgagacggagtctcgctctgtcatccatgctggagtgcagtggcaccatctttgctcactgcaacctctgcttcctgggttcaagtgattctcccgcctcagcctccctgatagctgggactacaggtgcacagtaccatgcctggagttagcctctctttatacaatacagcatctttgagttnggattgacagttctgttctttcaagagacactttttgagacctgtcatcttttaggcactgtgctgggtcctatggataaaaaactactgaacatgattcctgtaacagagatgctcctagtttattataaggacagatgttaggtgcagtgtgaaaaataaaatgttagacaaacaatctcttacagtctcgaaaatattcaaattcagactattttagagacagcacatccctgagaacaaaatagtaaatagtcaatttattcatttgttcattcacccaacaaaaattcttttgagtgtttgcaatatgttgggtgctaagctaagtcttggagatagagtggtaaaggaaacagatgaggtcctgcccttatagagcttatttaccttttagtgaggcatttacttaatcaaacgttcatagaaataaacagaaaattggagctgacaagcaccgtcaaagacagacacatggtgctaccagaggaaattaatgagagagttagttcttgttggggccatattacctcagagggaatagctcagaagtaaataggcattaactaggtaaagaatgggagcagggggcagaggagacaaaaccctgtagcagatcagggcactgaaattccgagaactgaaagaatgccagagagacctcaggagagagaggctgcgggtggggggtggagggtggtaatcatgctaattgaagcccaagagacatccagaggccagacaaagcaaggctttggggtggtagtaaggatatttaatcccaagaacaaaggaaagtcactgaaaataactgagtgacaaagtcatatttgttatttagacagctctttttagcttggcacataagtattggtgagaagccaaggtatgctggggaaagaccagcagagaattgctgaagttacaaggccagatatgatagagctttggctagagctgtggtataaggatggagggaagtggaggggtatcagatgtagttgggaggtaagggaagaaatcagtgatagattaaacaaaagccaggggaacaaaagagtaaggttgatactaagtttatctgacagttggtggtancatttactgggatagggacattggaagcagatcagatttggaaggcagattttgaattcaattttggatatgtttggtttagggtgactttgagagggagaaaagaaacatcaagtagacacttaagtctgtgtctggagcctagagtggaggtccacactggagatacacccgtgtgtatcataagtgtacaggtggtacatgacatcatggccatagatgccactgcctagagatacacaaaagagtgagaagaaaggagagtctggaaccaagctttaaggaacttaatctcacatctatgtgaacgaagatcaacctacagaggagatggaagaatatcacaaagataggtagagttacaaaaatgaaaggatgatatattttgataaagatcggatggtcagcaatataaaatgctgctcaaataacaggtttaaaccagttctttggagttattgacatggaagtcattggcaactttagcgaaagctattttatgaggaaaaaggtagactggagtgaagagtgagtgaggactggaaaattggatgcaatgagaacagagagacaaaacttataagaagagaagaacaggacatgtaggatttggggaagactttctagataagatggaagagacttgagtatgcttaaaagccattggtaaagacttaattgacagggctctgacagctatttcagagagaaaataggtaacgggtagtgttagctcatgagaaggggaataagcagaaagggatttgcggaagtgcccttaattgcatggttggtatgagaaagataagagaattcacctactgggaattatatcttcctgtaaggttggagacagtattattggctgaaggtgaggggacaagaaagagaggtaaaggtgtgaaaagagctgaaaaagtttgaaatatgttagggttttgtgtgtgtgtgtgtgtgtgtgtgtgtgtgtgtgtgtgtgtgtgtgtgtatgtgtgtccatatatattcaatgtttagctcccacttgtgagaacatgcagcatttggttttctgttcctacatttgttcacttagcataatggcctccagcttcaaccatgttgctgcaaaggacatgatctcattttttatggctgcatagtattccatggtgtatatatagcacattttctttatgcagtccaccactgatggacatttaggttgagtccatgtctttgctattgtgaatagtgctgtgatgaacatatgcatacatgtgtctttatggtagaattatttatattcctttgggtataaacccaataatggggttgctgggttaaatggtagttctgacttaatttctcggagaaattaccaaactgctttccacaatggctgaactaaattacattctcacaagcagtgtgtaagcgttcccttttatctgcaaccttgccagcaaattaaaaaaaaaaacagtattttttgactttttaatcatagccattctgactggtgtgagatagtatcttattgtggttttgatttgcattggcctaatgattactgatgttgaacatttttacatatttgttggttgtgtgtatgtcttcttctgaaaaatgtctgttcatgtcctttgctcactttgtgatggggctgttttttgcttgttaatttgtataagttccttatagatgctggatattagacctttgtcagatgcatagtttgcaaatattttctcccattctgcaggttgtctgtttagtatattgatagtttcttttgctgtgcaaaagctcattagtttaattagataccatttgtcaatgttttatttttgttgcaattgcttttggcatctttgtcatgaaatctttgccaagaccaaagtccagaatggtattttgttggttatcttccagcatttgtatagttttaggttttacatttaaggctttaattcatcttgggttaattgttgtatatgatataaaaaagaggtccagcatcaatctgcatttggctagttagttatcctagcaccatttattgaacagggaatcctttccccattgcttgtctttgttgactttgtcaaagatcagatgattttacgtgggtggtattatttctgggctctctagtctgttccattggtctatatgtctgtttttgtacctgtatcatgctgttttggttactgttgacttgtatagtttgaagtcagataatacgatgcctctagctttattcatttgctgaggattaccttagctattcaggctcttttttggttccatatgaattttaaaatgggtttttcaaattttttggaaaatgtcattggtagtttgacaggaatggcattgaatccgtaaattgctttgggcaatatgaccgttttaacaacattgattcttcctacacatgatggttgaattttttttattggattgtgttatttcngatttctttgagcattgttttgtaattctcattgtagagatttttcacctccctggttagctgtattcctaagtattttatttattttgtggctattgtaggattgtgttcttgatttggttctcagcttggatgttattggtgcatagaaatgctaccgatttttgaatattgattttgtatactgaaactttgctgaagttgtttatcagatctaggaggttttgggcagagactatggggttttctaggtataaaatcatactgactggtggagccaagatggctgaataggaacagctccagtctaaagctcccagcgtgagngatgcagaagatgggtgatttctgcatttccaacagaggtaccaggttcatctcactggggagtgtcggaaagtgggtgcaggacagtgggtgcagtgcaccgagtgtgagccaaagcagggcgaggcatcacctcacccaggaagcataaggggtcagggaattccctttcctagtcaaagaaaggggtgacagacggcatccggaaaatcaggtcactcccaccgtaatactgcacttttccaacagtcttagcaaatggcacaccaggagattatatcccgtgcatggctcagagggtcctatgcccacggagccttgctcattgccagcacagcagtctgagttcaaactgcaaggcggcagcaaggctgggggaggggctcccgccattgcccaggcttgagtaggtaaacaaagcggctgggaagctcgaactgggtggagcccactacagctcaaggaggcctgcctgcctctgtagactacacctctgggggcagggcatagccaaacaaaaggcagcagaatcctctgcagacttaaatgtccctgtctgacagctttgaagagagtagtggttctcccagcacgcagctggagatctgagaacggacagactgcctccgcaactgggtccctgacccccagtagcctaactgggaggtaccccccagtaggggcagactgacacctcacacggctgggtactcctcttagacaaaacttccagaggaacgatcaggcagcaacatttgctgctcaccaatatccactgttctgcagcctctgctgctgatacccagggaaacagggtctggagtggacctccagcaaactccaacagacctgaagctgagggtcctaactgttagaaggaaaactaacaaacagaaaggacatccacaccaaaacctcatgtgtacgtcaccatcatcaaagaccaaaggtagataaaaccacaaagatagggaaaaaacagagcagaaaaactggaaactaaaaatcagagcacctctccttctccaaaggaacgcagctcctcatcagcaacggaacaaagctggatggagaatgactttgacgagttgagagaagaaggcttcagacaatcaaactactctgagctaaaggaggaagttcgaagccatggcaaagaagttaaaaaccttgaaaaacgataagacgaatggctaactagaataaccaatgcagagaagtccttaaaggacctgatggaggtgaaaaccaaggcatgagaactacgtgaccaatgcacaagcctcagtagccgatttgatcaactggaagaaagggtatcagtgatggaagatcaaatgaatgaaatgaagtgagaagagaagtttagagaaaaaagaataaacagaaacaaacaaagcctccaagaagtatgggactatgtgaaaagaccaaatctatgtctgattggtgtacctgaaagtgatggggagaatggaatcaagttggaaaacactctgcagggtattatccaggagaacttccccaatttagcaaggcaggccaacattcaaattcaggaaatacagaaaatgctacaaagatactcctcaagaagtgcaactccaagacacataattgtcagattcaccaaagttgaaatgaaggaaaaaatgttaagggcagccagagaggaaggtcgggttacccacaaagggaagcccatcagactaacagcagatctcttggcagaaactctacaagccagaagagagtgggggccaatattcaacattcttaaagaaaagaattttcaacccagaatttcatatccagccaaactaagcttcataagtgaaggagaaataaaatcctttacagacaagcaaatgctgagagattttgtcaccaccagggctgccctaaaagagctcctgaaggaagcactaaacatggaaaggaaaaaccagtaccagccactgcaaaaacatgccaaattgtaaagaccatcaaggctaggaagaaactgcatcaactaacaagcaaaatcaccagctaacatcataatgacaggatcaaattcacacataacaatattaaccttaaatgtaaatgggctaactgcttcaattaaaagacacagactggcaaactggataaagagtcaagacccatcagtgtgctatattcaggaaacccatctcacgtgcagagacacacataggctcaaaataaagggatggaggaagatctaccaagcaaatggaaagcaaaaaaaggcaggggttgcaatcctagtctctgataaaacagactttaaaccaacaaagatcaaaagagacaaagaagcccattacataatggtaaagggatcaattcaacaggaagagctaactatcctaaatatatatgcacctaatacaggagtacccagattcataaagcaagtccttagagacctagaaagagacttagacgcccatacaataatgggagactttaacaccccactgtcaacattagacagatcaacgagacagaaagttaacaaggatgtccaggaattgaactcagctctgcaccaagcagacctaatagacatctacagaactctccaccccaaatctacagaatatacatcttctcagtaccacaccgcacttattccaaaattgaccacatatttggaagtaaagctctccttagcaaatgtaaaagaacagaaattataacaaactgtctttcagaccacagtgcaatcaaatcagaactcaggattaagaaactcactcaaaactgcacaactacatggaaactgagcaacctgctcctgaatgactaatgggtacataatgaaatgaaggcagaaataaagatgttctttgaaaccaatgagaacaaagacacaacataccagaatctctgggatacattcaatgcagtgtgtagagggcaatttatagcactaaatgcccacaagagaaagcaggaaagatctaaaatggacaccctaacatcacaattaaaagaactagagaagcaagagcaaacacattcaaaagctagcagaaggcaagaaataactaagatcagaacagaactgaaggaaataaagacacaaaaaacccttcaaaaaatcaatgaatccaagagctggttttttgaaaagatcaacaaaattgatagaccactagtaagactaataaagaagaaaagagagaagaatcaaatagatgcaataaaaaataataaaagggatatcaccactgattccacagaaatacaaactaccattagagaatactataaacacctctatgcaaataaactagaaaatctagaagaaatggatcaagtcctggacaaatacaccctcccaagactaaaccaggaagaagttgaatctctgaatagaccaaaaacagactctgaaattgaggcaataattaatagcttagcaaccaaaaaaagtccaggaccagatggattcacagctgaattctaccagaggtacaaggaggagctggtaccattccttctgaaactgttccaatcaatagaaaagagggaatccttcctaactcattttctgaggccagcatcattctgataccaaagcctggcagagacacaacaaaaaaagagaattttagaccaatatccctaatgaacatcaatgcaaaaatcctcaataaaatattggcaaaccgaatccagcagcacatcaaaagcttatccaccatgatcaagtctgcttcatccctgggatgcaaggctggttcaacanacgcaaatcagtaaacataatccagcatataaacagaaccaatgacaaaaaccatatgattatctcaatagatgcagaaaaggcctttgacaaaattcaacagcccttcatgctaaaaactctcaataaattaggtattgatgggacgtatctcaaaataataagagctatctatgacaaacccacagccaatatcatactgaatgggcaaaaactggaagcattccctttgaaaactggcacaagacagagggatgccctctctcaccactcctactcaacatagtgttagaagttctggccaggacaatcaggcaggagaaagaaataaagggtattcaattaggaaaacaggaaatcaaattgtctttgtttccagatgacatgattgtatatctagaaaaccccatcgtctcagcccaaaatctccttaagctgatangcaacttcagcaaagtctcaggatacaaaatcaatgtgcaaaaatcacaagcattcttatacaccaataacagacaaacagagagccaaatcatgagtgaactcccattcacaattgcttcaaagagaataaaatctaggaatccaacatacaagggacgtgaaggacctcttcaaggagaactacaaaccactgcttaatgaaataaaagaggatacaaacaaatagaagaacattccataatcatgggtaggaagaatcagtatcatgaaaatggccatactgcccaaggtaatttatcgattcaatgccatccccatcaagctaccaatgactttcttcaaagaattggaaaaaactactttaaagttcatatggaaccaaaaaagagcccacattgccaagtcaatcctaagccaacagaagaaagctggaagcatcacgctacctgacttcaaactatactacaaggctacagtcaccaaaacagcatggtactggtaccaaaacagagatatagaccaatggaacagaacagagacctcagaaataatgctgcatatctacaaccatctgatctttgacaaacctgacaaaaacaaggaatggggaaaggattccctatttaataaatggcactgggaaaactggctagccatatgtagaaagctgaaactggatcccttccttgcaccttatactaaaattaattcaaggtggattaaagacttaaatgttagacctaaaaccataaaaaccccagaagaaaacctaggcaataccattcaggacataggcatggacaaggacttcatgtctaaaacaccaaaagcaatggcaacaaaagccaaaattgacaaatgggatctagttaaactaaagagcttctgcacagcaaaagaaactaccatcagagtcaacaggcaacctacagaatgggagaaaatttttgccatctactcatctgacaaagggctaatatccagaatctacaatgaactcaaacaaatttactagaaaaaaacaaacaaccccatcaacaaataggcgaaggatatgaacagacatttctcaaaagaagacatttatgcagccaaaagacacatgaaaaaatgctcatcatcactagccatcagagaaatgcaaatcaaaaccacaatgagataccatctcacaccagttagaatggtgatcatgaaaaagtcaggaaacaacaggtgctggagaggatgtggagaaataggaccacttttacactgttgttgggattgtaaactggttcaaccattgtggaagacagtgtggtgattcctcagggatctagaactagaaataccttttgacccagccttcccttactgggtatatacccaaaggattataaatcatgctgctataaagacacatgcacacgtatgtttattgaggcactattcacaatagcaaagacttggaaccaagccaaatgtccaacaatgatagactggattaagaaaatgtggcacatatacaccatggaattctatgcagccataagaaatgatgagttcatgtcctttgtagggacatggatgaagctggaaaccatcattctcagcaaactatcacaaagacaaaaacccaaacaccgcatgttgtcactcataggtgggaactgaacaatgagaacacatggacacaggaagggaaacatcacacactggggcctgttgtggggtgggggtgtgggggagggatagcattaggagatatacctaatgttaaatgatgagttaatggatgcagcataccaacatggcacatgtatacacatgtaaccaacctgcatgttgtgcacatgtaccctaaaacttaaagtataataataataaaaaataaaataaaatcatactgtccgccgggtgcagtggctcactcctgtaatcccagcactttgggaggctaaggtgggtgaattgcctgatctcaggagttcgagaccagcctgggcaacatggtgaaaccccgtctctactaaaatacaaaaaatcagttgggcatggcagcatgttcctgtaatcccagctactcgggaggctgagacaggagaattacttgaactcaggagatggaggttgcagtgagctgagatcgtgcaactgcattccagcctgggtgacagagcaagactccatctcaaaaaaaaaaaaaatcatactgtctgcatacagatagtttgacttcctctgttcttatttggatgccttttatttttttctcttgcctgttgttctggctaggagttcgagtattgtgttgaatagagtagtagtgatatttggcatccttgtcttgtgctggctctcaaggggaatgcttctagcttttacctattcagtatgatgttggctgtgggtttgttatagatggttgttattttgaagtttgttcctttaatgcctagtttgctgaaggtttttaaaatgaagtgatgcttaattttattgaaagctttttcctcatctatcaaggtgatcatgtagtttctgtttttagttctgtttatgtgatgaatcacatttgttgatttgtgtatgttgaactaactttgtatcccagggataaagtctacttaatcatgctgaattagctttttgatgtcctgttcgatccaggacatagtttgctagtattttgttgaggatttttccacctatgctcatcaaggatattggcctgatgttttctttccttcttctgtttcttccaggttttggtatcagaatgatgctggcctcataaaatgagttagggaggagtccctcctagtcagtttttttgaatagtttcagatagaattgtaccagtcagctctttgtatgtctggtagaatatgcctgtgaatctttctagtcctgggctttttctggttggtaggtgttttattactgattcagcttcagaacttgtcattggtctgttcaggatttgaatttcttcctagttcaatcttgggaggttgtatgtttccaggaatttaccctgaaaaattctaggttttctagtttgtatgcataaaggtgttcattatagtctctgagggttttttgtatttctgttgggtcgatggtaatatcccctttaccatttctgattttgtttatttggatcatctctctttttttttctttgtttgtctagctagtggtgtatcaattttatttattctttcaaaaaaccaactcctggattcattgatntttcaattttttttgttttgcatttcaatttcattcaattctgttctgattttggttatttcctttcctctgctagcttttgggttggtttgctctttttctgtttcctctaggtgtgatgttatgttgttaaattaaaatcttcctaactttttgatgtgagcatttagcactataaactttcctcttaacactgctttaatattgataagatagagattctggtatcttgtatctttgttctcattcatttcaaataatttcttgatttctgccttaatttcaatgtttacccaaaagtcattcaggagcaggttgcttatttttcatgtaattgtatggttttgggtgatttccttagtactgatgaaatggtttggctctgtgttcccacccaaatcttgccttgagttgtaattgtcataatccccacgtcaagggtgggaccaggtggaggttattggatcatggaggtggtttcccccatgtggttcttgtgatagtgagttctcatgagatctgatggttttataagcatctggcatttctcctgcttgcactcactccatcctgccgccttgtgaagaaggtgcctgcctttcctttgctttctgccatgattgtaagtttcctgaggcctcctaggagtgcagaactgtgagtcaatgaaactttcttcctttataaattacccagtctcagatatttcttcatagctgtgtgagaataaactaatactactgatttctattttcattaagctgtggtctgaaagtgtggttggtatgatttccgtttttttgaacttgctaagaattgttttatgacacattgtgtggttgattctagagtatgtaccatgtgcagatgagaataatgtatattctgttatttttggttggagagttctgtagatgtctgttaggccaattaggtgaagtgttaagttcaggtctcgaatatatctatgttagttttctgcctcagtgatccatctgatactgtgaatagggtgttgaagtctcccactattattatgtggttatctaaatctctttgtaggtctctaagaacttgttttatgaatctgggtgctcctgtgttgggtgcatatatatttaggatagttaggtcttcatgttgaattgaaccctttaccattatgtaatgcccttgtctttttgatcattgtcagtttacagtcaattttgtctgaaattataatacaaacccatgccttgcttggtataattttcttcattcctttactttgagcctatgagtgtcactgcatgtgagatgggtctcttgaagatagcatacagttaggtcttgtttcttcattcaacttgccactctgtgtcttttaattgggacatttagcccatttacactcaaggttaacattgacatgtgtggagttgattctgtcatcatgttgttagctggttattatgcagacttgattgtggagttgctttatagtatcagtgatctatgtacttaagtgtgttttcatggtggtgggtaatgttcttttcttttcatatttggtacttccttatggacttcttgtaatgcaggtctggtggtaatgaattcccttagcatttgcttcnctgaaaagattatacttctcctttgtttatgaaacttaatttagccagatatgaaattcttggttggaatttcttttctttaagaatgttgaatataggcctctggcctcgtctggcttgtagggtttctgctgaaaggcctgctgttagcctgatggaatttcctttgaaggtgacttgccagccgggcgcggtggctcacgcctgtaatcccagcactttgggaggccaaggcgggcggatcacctgaggttgggagttcgagaccagactgaccaacatggagaaaccccgtctctacgaaatacaaaaatacaaaattagccaggcgtggtggcacatgcctgtaatcccggccctggggaggctgaggcaggagaattgcttgaacctgggaggtgaagactgtggtgagctgagatcgcttcattgcatgccagcctgggcaacaagagcaaaactccacctcaaaaaaaaaaaaaaaagacttattttaatgagttggactcagattagctaataaaaattgcctaagtgtgaaccttcatatttcctatgtatggggaatgttacgaggtatgctggtgggaacacaggagagcacatggaatgattatcccccacttgcagaatttcttgtttggctagaaagggaacatacttgtacaaaaggcataaaaagatgtttaaagaggtgagcaaaggctcagagagtaagagaaagtagagactacagaaatattccataaaggaagattcaggaagaagtgtgtcagaagtagagcaagagcgaaggttggatttgctgactactactaatccatttctcaggagcatgtgcagatgcacatgggaggttataatgtcggtatctgttagaaccctattctgttggccagaagtcaatcacacaaccccacttttctgctagggtggctgaaaaatactttacctgtgttcctggaaggaaagtgaggcttttttgagcatttaaccagtctctgctacacacccactggaactttgcagaataaacttcagttcctctcctcctcattcattttttaaaccttcccttctccaagtgagacactgttagttctatcaactattattcatatatttatttttgttcccaaaccctctactatcctggccatcataaagcaaacattcttgatttttattgttcttctcaaaatgagatgctcactgtagaacgtaatactgtatatgtgattttttaaaatgctggtaaagtgggattattgttttcattgatttcataactatcaggtcaaagagagggccaagattggggactttgcatttttaaaaaaagagaatttgaagaaggaaaagggtctccaggatgccacttcagtatggcagctgtgggaagcactagtggtaaggtgctagctattctttcctacttctccaagaggaaaaagggtactcacactcacaaatcaattcatttccatcaaaactccaaagtgaagtcaaggagaataagtgcactcaaatgatgttacttatatattagattatggatttaaataaaacaccaaggatttctgtattaaaatctttttattgtgatgttaactagtccacatgtcttacatagtatctaggtcttatgcttaataatttggccagtagtccaaattattacatgatatataagcaaattagcattgctataagaaactaaaatttatcacctgctgctaatatggcattgatgttgtgccatttcagcatatccctatggccccattcctgatgttttcatctgtagatccagtgaggagagaaaaaaatgagtcgttttttcctgttcttttctttcaacagttgtgctttcagtgttctctgttaagaaatattataaccctgagggagtgaatgttcttatcagagaagagaactggttgaaaatgatttagtttctgaattcctagaagaagggaaaaagcctaagtgtccatctctctatctagtctactaataggattacctatttcaaatatatataatttttctaaattgagtttttaatgtcaaagtttcaggatccactggtttccatagttttagtttgtccagttgtttatggttaggctcattgtgaacagtgaccattatacttctctttttctataaatgtggctgcttttgagaatggaagttgtaggaaacagaattcattgtaatctgaatttaaatttagcttcctgttgcagctcctcccctccccctcctccctcatgtttctccctgtccccagactgtctttcagaggcagatgctatgcacataaatgacatttattgatttgagtattagagactttttcttgacagactcacccatcacaatatttaagtaatattaacagtttcccaccaagaactcagagtaaactaaacagtgagtatccaggcagaaagccatgtacttttagagctcaatatgtttataatatatatgaaggcaaacatagaggcaacataaatacctattctacttggttgtaatctgccaatttatatttttcggagaagagtttatcactaaatcactgagaggcagagtaggatatctgggggaaatggtggtgggcggggggcaagtttgttatctggaaaaaagattgggagccagggaggattttcaaattcgaatccctcagctcagtcttggggcatttgttttgccatctgaattatcttggaacccagagaaaaactggttgtgaaaactacagatgcaattttcttctttggcttttcccataatactgtaattataaaccatgctgtgttagagtggaacattctttggagagcatcctaaagtgcactttgatcaaattttgccttatgtggcaacatttagaaacacaagccttcgtggggtttctggctctactttttactgatgggctgataatcttatagtagcattagttttgccaccaattaccaaagatttgttattattggtttttaaaattggacaatccttaaatgtctacagcaacgttagaaacagacccacaagtgggtgggtcagactagtttggaaacctccaatcttggctatttggtacctcagaattcaacaagggatgttggaaaattttcaaaataaaattaatttaaattcagttttgcaaaagattatactatagaacacattgaaaaagagaaggttagctggaaagtcaaacataatagaatttgaaaattactaggctttaagttatgaaaatatttcccatatgttgagacagaatttgtattctcttttttctcaatggcattttatgagactatatactgctgctcttctgtataaatagaatagaaacatctccatttttaaattgtcatggaaataagtaatggcctgtgaacaaaatgacttctttttgttttgttttgttttgttttgatggagttttgctcttgttgcccaggctggagagcaatggtgctatctcggctcactgcaaccatagcctcctggattcaagtgattctcctgcctcagccttccgagtagcttggattacaggtgtccaccaccatgccccactaatttttgtatttttagtaaagacagggtttcaccatgttggccaggctggttgcaaactataggctgtcactctctatgctttaatattttggttaattttaagggcataatttgtggggacattgttcttatttgccattacttttcatagcaaaaacagcaattacttttgcaccaacctaatatttcctttgctaatctagtgtgacttcggaacagtgataaataaaggttggggaagaaagggctgactagtaaatgcagacagagttgaggcaatttcacagttccattggcgtgttctatgggccatttcactttcagatggtttgtctggctgaatttagaggctaacctctggggttttgcctttcttcttgtgacctgagaatttgctggcatgtacaagtcaattttcttaatagcctttcttgattagtctatagcttcttcagtgagttgatatgtcacatttacttatactaaaatcttacactagacatattttggtgtctttggcatcaaacctcttttagtcatttgtctttcttgtctagagctagtgtcataatattttcattgttacaggtttctaatacactttaagatctagaatgacataactcccattgtatctttctccttttatcttttaagaaaaagaattaccatggaaaataatgcttctgtttctgtgtcgttgtttaaagtatttacaactcttgttgtgaatttttttcttttaatatattcctgaactttatttatatatttaattagttatgtttgcatttttaaaaagtgagataggtgtatcttttcaaaaataatcattgtcaggtatggtattaggtttgtaatagctattagctattacattacttttaatggcaaaaaccacaaatagttttgcaacaacgtaatataatgaatacaataggcttccattgtttatctatgttgtggaatatagtgtaattctgaaataacttacttcttatacaatttttgttttgcttttttggtttagatcgacttttctaaaagtctttttcttttgtttctgctatatatttgttttcctatgttccggtttcgatttctttctggatcagtttcatcacttcatgttttcttacattattgccactgcattagtctgtcacgttaatcagaataggattgtatatggtattcttttgtatatttttaatcttgtttctatatttggtgaaatatactttgtaatttttaaggaaatctaaattttcttgtcttactcttgcagagttctacttacttaattgccgtttttctgctttgatttttattaactcatttttccagccttccttggggtcctgatctttttctaggtcattaaatgaatatgtcattctgttttgttttttattgattcgttcctgtgacttttcttcaggttattttgttgacctttattgaacttctccagtttattgagttgaatattttgttattttattttattcaatttttaaaatgatgagaaccctgaatgccatgtgtttttttccttttgagtccatcctttaccacacatcattagattttatatagatttttcagttgttcttaactttaaaatagtttgtaattacaatttggatttattctttagcctatgccatttagaaatgttttatgttaaggtttacctttgcgtttttatttttaaaggttatcttatgatattaattccactggattatgtgtacgtctttcacatacttatgcattcttgtggtttatataatttctatgttttatagctttcatctgcctctatctaatatatgaacaatttttgatcaactttttacaaaagtattttcttgatttgaagaatccaaacttttaaatgtaactgttagaccaacttcattaattgaatttactcatatgctttatggaccttttaattttccagctactttttctctttaagagagttttgttagactttagtactgtatttctgttagtttcttcttacagttataactatgtgtgtgtgtgtatgtgtgtgtatacacacatgtatatatatttatacacacacattgtaatatgtagtgtcttatgggctacaacattttcttagagtctatattttatttgaagctagagttttttttttttttaagtaagaagttttatttcttcctggaatcttgcaggatttttttttctgtttactcagtagtttaaaaagtgccagatatgttaaggtttaggtcttttactgatttatttttttcctggagccatgtcacccattttcctgagatcaggaaagttttcttgggatgtgtatttggttattgtttctgttttatttctctggactctcctctaggaatactgatgagctatatgttagctccctagtctctgtttttcaattctttcttcttctctattgtacttttattttcctttctccctgtgaaggcttatagaactgttaaataatgcttaagcccactgtctttcttcagtatcaattaattcttctactttgcttttaatttctatgtaatcttcctttaaaaaaattctctctcccttttcattttacccactgtccattgccttgtttaacctacctggaatcctcttcatttcatcctgttttcttttcataaaggccaatttattggttctttattaaggacaccaagtagtcttctgagtttttcttttggattctgcagtaaaaatttttcagaggtttgttctgaatttttggagcactattctctttcccctgttgtgtgttgtgtgtgtgtgtgtgtgtgtgtgtgtgtgtgtatagctcaaaactaaaataactagagaatcaaatatatatatatatattactcaattttaagtaaagccacaaagatacccaagttgagtgggtttttttggtccagctctttttctattacaatggtgttgaaaacttaatatccagtttacagtttaatgaatattgttgggtttagttgccatttcaattaccattttctgttaatttttatttaaagtatctcctctcagttggcttttgatcattcagcttctgcagcctgattctttgatactataagaagttatacacggtatctgtaattctcaacctatcaggattgctcctctgtgctctgttcaccttttctctctccatttctttttttttttttttttttttttgagacggagtctcgctctgtcgcccaggccggactgcggactgcagtggcgcaatctcggctcactgcaagctccgcttcccgggttcacgccattctcctgcctcagcctcccgagtagctgggactacaggcgcccgccaccgcgcccggctaattttttgtatttttagtagagacggggtttcaccttgttaaccaggatggtctcgatctcctgacctcatgatccacccgcctcggcctcccaaagtgctgggattacaggcgtgagccaccgcgcccggcccttctctctccatttcatcaaccaaaggctctacctctgcagactaagccttttggaacatgtggctttacgggcctctctcccctactttctgctcactttttttttcttaaatacgctggaatggtgggagaaagagcatttgcctccaagtaaaattccccaaaccaagaactctgggtcccttttatccaataaagaaaagaaggagtgtttgctttggcagaacatatactaaacttggaacaacacagagaagattagcatgaccctcacacaaggattacatgcaagttcctgaagcgttccatattttcttacgtaatagtaaagggttcgattcaacaagaagagataactatcctaaatatatatgcaccccaatacgggagcactcagattcataaagcaaattcttagagacttacaaagagacagactcccacacaataatagtagaagattttaacacctcactgacaatattagacagatcattgagacagaaaattaacaaagatattcagaacctgaactcagctctggatcaagcagacctgatacatatctacagtattctccactaaaaacaacagaatatacgttcttttcattgccatacagcactgactcaaaattaatcacataaccggaagtaaaacacgcctcgcaaatgcaaaacaactgaaatcataacagtctctcagatcacagcacaatcaaatcagaactcaagattaagaaatccagacatagaggccgggcgcggtggctcacgcctgtaatcccagcactttgggaggccgagacgggcggatcacgaggtcaggagatcgagaccatcctggctaacacggtgaaaccccgtctctactaaaaatacaaaaattatctgggcgtggtggcgcgcgcctgtagtcccagctacacgggaggctgaggcaggagaatggcgtgaacccgggaggcggagcttgcagtgagccgagatcgcgccactgcactccagcctgggcgacagagggaaactcccgtctcaaaaaaaaaaaaaaaaaagaaatccagatataaccacacaattacatggcaattgaacaacctgctcctgaatgactcttgggtaaataatgaaattaaggtagaaatcaagaagttctttgaaactaatgagaaaaaagagacatcataccagaatctctgggccgtagctaaagcggtgttaagagggaaatttaggctgggcacggtggctcacgcctgtaatcccagtacttggggaggcctaggtgagcggatcatttgagctcaggagtttgagaccagcctggccaacatggttaaaccctgtctctactaaaaatacaaaaagtagctgggtgtgtggcacgcacctgtagtcccagctacttgggagcctgaggcaggacaatctcttgaacctgagaggcggaggttggagtgagcgagattgtgccactgcactccagcctgggtgacagagtgagaccctgtctaaacaaaacaaaacaaaacaaaacaaaaaaccaaaatttatagcactaaattcccacatcaaaaatctggaaagatttcaaattaacaatctaacatcacaactaaaggaactagagaatcaagagcaaacaaaaccctaagctagcagaagacaagaataaccaagatcagtgttgaattgaaggggatagagacacaaaaaaatccttcaaaatatcaacaaatccaggagctggtgttttgaaaataattaataaaagagactgctagctagactaaaaaagaataaaagagagaaggatcaaataaacacaattagaaatgataagggggatatcaccactgactccacagaaattcaaataaccatcagagaatactttaaacacctctatgtatatatattggaaaaactagaaaaaatgggtaaattcctggacacatacaccttccaaagactgaaccaggaagaaattgaatccctgaacagatcaataacaaggtctgaaattgagacagtagtaagtaacctactaaccaaaaaaagccctggactagatggattaacagctgaattctaccagaggtacaaagaagagctggtactatttctgctgaaactattccaaaaaaaaggagggactcctccctaactcattctatgaggccagcatcatcctgataccaaaacctggcagagatataacaaaaaaagaaaacttcaggccaatatccttgatgatcattgatgcaaaagtcctcaataaaatactgacaaaacaaatccagcagcacatcaaaaagcttatccaccatgatcaagttggcttcatctctgggatgcaaggttgtatcaacatatgcaaatcaataaatattattcatcctataaaaaaaactaaagacaaaaaccacatcattatctcaatagatgcagaaaaggcctttgataaagttcaacatccactcatgttaaaaactctcaataaactagatattgaatgaacatacctcaaaataataagagccatatatgacaaatctacagccaatatcatactgaataggcacaaaacaaggatgccctctctcaccactcctattcaacatagtattggaagttctggccagggcaatcaggtgagagatagaaataaagggtattcaaataggaagagaggaagtccagttatctttgtttgcagatgatatgatcctatatctagaaaacagatagtttcagcccaaaagcttcttaatctgataagcaacttcagcagtcaggatacaaaatcaatttgcaaaagttgctggtattcctgtacaccaacagcaggcaagcagagagccaaatcatgaatgaactcccattcacaattactacagaaagaataaaatacctaggaatacagctagcaagggaagtgaaggacctcttcaaggagaactacaaaccaatgctcaaagaaatcagacataacacgaatggaacaacatttcatgctcatggatgggaagaatcaatattgtgaaaatggtcatgctgcctaaagtaatttatatattcatgctattcccattaaattaccattgacattcttcacagaattagaagaaactattttaaaattcgtatggaaccaaaaaagagcccaaattgccaagacaagcctaagcaaaaagagtaaagctggaggcatcatgctacctgacttcaaaatatactacaaggctacagtagccaaaacagcatggtattggtataagaacagacacagaaggctgggcgcattggctcacgcctgtaaccccagcattttgggaggcctaggcaggcagatcatgaggtcaggagtttgagaccaccctgaccaacatggagaaaccccatgtctactaaaaatacaaaaattagccaggtgtggtggcatgcacctgtaatcccaggtactcaggaggctgagccagaagaattgcttgaacctgggaggtggaggttgcagagctgagatcgtgccactgcactccagcctgggcaacagagtgagactccatctcaaaaagaaaaagaaaaaaaaaaagaacagatacatagcccaatggaagagaatagagaactcagaaataataccacacacctccaacatctgatctttgacaaatctaacagaaacaagcaatggggaaagcattccatacttaataaatggtggtgggagaacgggctagccatatgcagaaaattgaaattcggccccttccttacaccatatacaaaaattaactcaagatgaattaaaaacttaaatgtaaaacccaaaaccataaaaaccctagaagaaaatctaggcattaccattcaggacataggtacaggcaaagatttcatgatgaaaatgccaaaagcaattgcaacaaaagcagaaattgacaaatgggatctaattaaactaaagagcccctgcacagcaaaaaaaaactatcatcagagtgaacagacagcttacagaatgggagaaaatttttgcaatctgtccatctgacaaaagtctagtatccagagtctacaaggaacttaaacacatttacaagaaataaaccaatggcccaattaaaaagtgggcaaatgacatgaacagacactttgcaaaagaaaacattcatgcagccaacaagcatctgaaaaaaagctcagcatcacgtcattagagaaatgcaaatcaaaaccacaatgagatactatctcacaccagtcaggacagctgtgattaagaataaaaaaaacaacagatactggtaaagttgtagagaaaaaggaatgcttttacactgttggtgggagtgtaaattggttcaactgttttgggagacagtgtggcgattcctcaaagaccttgaggcagaaataccatttgagccagatcccattactggctatatacccaaaggaatataaatcattctattataaagatacatacatgtgtatgttcatcacagcactatttacaaaagcaaagacatggaatcaacttaaatgcccaccaatgatagactggataaagaaaatatggaacatatacaccatggaatgctatgcagccataaaaaaggatgagttcatgtcctttgcagggacatggttggagttggaagccactgtcctcagcaaactaatgcaggaacggaaaaccaaacaccacaggttcttacttataagtgggagctgtatgatgagaacacatgggcacatgggggaacaacacacactggggcctgtgggggtggggtggcttgtggagagggagagtatcaggaataataggtaatgtatactgggcttaatacctaggtggtgggatgatctgtgcagcaaccaccatggcacatgtttacctgtgtaacaaacctgcacatcctgcacatgtacccttgaacttaaaagttgaaggaaaaaacaaaagaaggatatgttcttagttttctatacctatgagccagtcaattggaagtgaaagctgggtatgccaaggaataactaaattccctttacggtttcaaagttagaacctatttttctcttaagattatggaattgattatccattacttttggttttaaaggctgtcttcaatggttttagtgacaagttggtcacagcagcattacatgattttagccagaagctattttgaacctaaaattcctatcagaaggttgaaaaaaaacctaattttacttttatttagagcttgtgtgctaattatttgatttttaaatttccgactccacttggaatgaagacacaatccagtagttaatattaaagtatgaactttcaattgtttcctttcttccttttttttgagataagaatccctcaaaagaataagtgaaacagagacttcaaagttccgtggtgactgttgaaatataacagaatcgcactgtgtttgaatttactgtgatatatttctaatgtcttatatttggtatgtttctcttgttgttattgctgacacaaaccaaagaacaagaatttcttttatgccactgatttgcaaaggtcgtatagaaaatgaagggtcagataatggatgttaatcatcctcattgatggatacattgacaggaaaacataattgaattgcacatattagtggaagataaaaaaccatttcacaaatcgttcttagtagagaaaaaaatgataggagagctaaaattgatgtgaaaaacacagaaggaagttaagggattagagtgggagggaaattagtgaatatctatttgtgtgcatgattgcatttttgaaataattagttgcctaatttgtgtatccaaatatagtaattgtttttccatagtcatgacttaaatattctctgtgtgtaattttcagttgcatacatttttttgcagaatcaaattgcagaggaatacattcatttgaaatttctctagggatgtgtttataacccattttggaaagagtagaaagattttttttctcttccaaatggctatgaaggtggataacttctctgatcttttagtaaacacttttatgttagttgaatggtatgcagttagtcataaacaggagagattgaggaaaaataacatgcttaatgcaaataaattttctgtacctgataagttaattggaattttttcctgtaatcttttttttttttatttttctggtagatgcttgttgatttaaggtaagatagaaaagaatcatcaaactatatgtaaaccacagccaaatgatgaattcatagtttttgctcaagtagagggattatctgaaagtacaaaaagaatttgataattgagaaatacattattttgaatgcacatttgaagtagctaaaaattctacgccacagctgaatgcactggcagtttgttaatcacatccataaacatgagtcttctacaattggagtgggccccacacttggaacatcttgaagatgtttcttctttggctgtgctaaattaagcatgcaaagaagttatattgtgttaacatttccacaatgaaatcttattggcacttcctgtataagtggctgggaatagaaattctcatttatgaatcaaaacactttgcctttttatttggaggtcaacctactaacctttggttataggataataccagcaattttattataaagtgtatttcagtaattggaactgtgttttgattatacaattggatagaatgtataataaaatgaaatgaaagaaatttctcccagaagattgagttaaaaatgttttggtgatgaaattgagatgatgtccagatttatagcatgtttggtaaccataacatacttctcgatatattgaattccatgtaaatgcttatttcttcaaaccctttaaatttcagagtattttctcccttctgttattaatcagttctattcatagtggatcttagaaaattatccagtgattaatatttctccatatttgtagctttcattactttatatttctgtttttgcctaggctccttgttaccagcctgttctaatgtcacaaaacttggcaaaccctacccaagaagggtaaggtttagtatctatgaattttgaaaatacttgatgagaaaagttgcttttaaattattttgaatcttattaataccaaaaatatttgaaaaagagaagcaggtacatttttccaatattcaaatttcattcaatgtataaatactcaaacctttttttataaattatactttaagttctgggatacatgggcagaacgtgcaggcttgttacataggtatacatgtgccatggtggtttgctgcacccatcaacccatcatctacattaggtatttctcctaatgccatccctccccttgccccccacctcccgacaggccctggtgtgtgatgttcccctccctgtgcccatatgttctcactgttcaactcccacttatgagtgagaacatgtggtgtttggttttctgttcctgtattagtttgctgagaatgatggtttccagcttcatccatgtccctgcaaaggacatgaactcattcttttttatggtggcgtagtattccatggtatatgtgccacattttctttatccagtctaatattgatgggcatttgggttggttctaaatctttgctgttgtgaaaagtgctgcaataaacatatacgtgcatgtgtcttttgcaatagcatgagggaaggagattggaaaacattgactcattgtacaatttaaatacgccaactttgtcaacttttattacaactggaaagcacttatggtacttattagaaagaaagtgtgtgtggatacgtatgtgtgtaaaaatatggctcttcttaaaaggaggcttacccagtcatttttttttgaataatagctgcattggaggtaagaaggtacctcaagacattttctctaattgtgcaggaaaaaacaaataaaggagatgaagactaggctgctgtcattctgtgccatctctgacatctatggaaagcctagaggcccaagaatacttcctccccagggtgctattgcagtatcttcagggtcctgagtctgaatgttcctattttatgtaagcattgtacccagaagaatgggtcagaacctctcctatggtctgaatgtttgtgtccctccaaaattcatatgttgaagtcctcacctccaaggtgattgtattaggagttgaggcctctagggggtgtttaggtgatcctcatgaataggactggtgctcttataaaagaggccctagggatctccgttaactcttccaccatgtgaggacaccgtgagaaggtgccatctatgatgaagctggcccttattagacatcaaattctctggttccttgatcttggacttcccagtctacagaatgtgagaaataaattactgttgtttataagccattgtgtttgtggcattttgtttatggcagcccaggtggactaagacagccttttaataggcaaggggatctaaagacataggtgaaccaagcaagtcagtctgcagctcagaaaactcaagtccccattcaggcagctgcctgatgatgttagctgtaatctcctgtgtttgtgcctgacttgctgcctcagtttagctcagtggttctcaactgggggcaactttgaccatagggacattaggcaacgtctggagacattgtcacagctagaggaagggtgctactgccatctagttggtagaagccagggttgctgctaaacatcctgcagtgcacgggacagcacctcctcccatcccagcaaggagtcatctgtaggaatatttgataaaagccatctacataaaagcccaacagctcacatcataattaaagatgaaagactgcttttcccataagattgggaacaaggtagtaatgactgttctcaaatctctattcaacattttactgaaggtcttagcaacagtgcaagaagaataattaaaactcatacaatttgcaaagcaagaagtaaagcagcttttattcacgtatgacataaacagatacttaaataaccataaggaatagcttccataaaggggacttgaaccaataagtgagtttagaaaggtctcagtatctcagtcaatacaaatttaatcatgtttataaatacaatggacaattaaaactaaatatttaaacatttcatttcttataatgccagaaaatagaaaatacttagtagcaaatttaatgaaatatgtgcacaattcttatactgaaaactataatttaccaagataaatttaagaagacttcaataaatggagagatatactttgctcattgatcagaagactcaataacaatttaggatattaatttttcctgaattaatctatatattcaaatttatcttaatcttcatcacaatggcttttattttataggaattgacaagcttattctaaaatttatatgggagagtaaagaaggtagaatagtcagaataatcttgaaaaacaacagcaattctacctgactctataaaatatagttgtattataactgtaaaaatacagttgtattaaagattatgaggttttgacataaggatagacaaataaatgaaggaaataaaagagtccagaaatagacacacatttataaagtaaattgatttttttcaagacaccaaagcaattaaataaaggaatggagaggcttatttataaatgaaattggaataaattgatatccatatgggaaaaaaataaattttcactccctaaattcacacctcagacaaaaatcaattcaagatggattggagacctaaaagcaaaggtaaaactctgatacttcaagaacagaacatgacaggattcagaaaattataaccctcaaaattggtaaattagactgctcatcaaaagacatacgtaaatgagtaagagagccactaacaggacaaaaatatttgtaaaacatatctgacaaaggactttaatcaatatcacataaagcacatctacattaataagataaagaccaaagaaaatagctcaataaaaatgggcaaagcatttcaagggacactttacaaaagtaaatatacaaatggccaatgaacacagtaaagagtgctccacatctttaggcttcagctaaatgcatttacaaccacaaagaaataccaccacacatccactagaaaggacaaaattaaaaaggttgaaaacaccaaatactggtgaggagttagaaccactgaactcttacacttgttgataggaaaattaaatgttgtaactactttgaaaaatgttttgcagataataaaatgttactttcacctaccctttgacctagcaattccactcctattgtttacccagaagcaaattttatgttacacataaaaaattatatcatacataaatacttgttaaaatattcataaacccacatattcataaacccacatattaatcaaaagagaatcaataaacaaattttgtcacagttatacaatggagtattactccgcaacaaaaatgaatgaactactgatacctgcaacaaaatgagtgactctcacagacaaaatgctgagtcaaggaatcgagacaaaaaggaatacatgtggtatgattccatttctaggaagttctagaacaaaacttaggttagaaaaagggaaaaaggttagcctctgaaagggaagactgaccagagagatgagagaactttctagggagatggaaatgttctgtatcataaggatgtgggttacatcttttttttgtttgtttgtttgttttgagacagagtctcgctctgttacccaggctggagtgcagtggcgccgtctctgctcactgcaacctccgcctctcaggttcaagcgattctcctgcctcagcctcccgagtagctgggactataggcgtgtgccaccatgctaggcgaattttttgtatttttagtagagatggggtttcaccgtgttagccaggatggtcttgatctcctgaccttgtgatcgcctcccaaaatgctgggattacaggcatgagtgcccggccgcgttacatctttttaagtattttaagtaaattggtagtcagtgttcaggaatccttctaatgactcttcaacaggggtggcttatgaaatagttcatcaatttttttttctgataaggggaggttgaggcaggaggattgcttgaacttgggggggcagaggtttcagtgagccgagatcataacacttcactctagcgtgggtgaaagagtgaaactgtctcaaaaaaaaaaggggggaatttacactcttgaaaataaatatttcataaggaaactttagagttctccaatatacatgatcaaacaaggacctgttaccattttggaccatgtcataatagagaggagatagttcaaaattagtcatatgttccaacaacaacatgattatggaaactagtcttagaattgagagtaattgaagtttttgtttttactggtattaataaatggtattactcaattcgttgacagtaccagtctctgcaatatcttttgttggggaagggggagaggacctgttcgtctaattagaaacacatctacattttaagaataaaatattttacatatactttttgttattaaatctgcaaactctagaattggaagaaatagccttcataactcttcactgcaaaagttatgaatgtttgatagaattaattaaagcattcagtagaattagacttgtttggaaggactgtaggatctttggcaagaagtgtgttttatattgtttcagatgtataccattttctcttaaggtttacaagttaatcaataaagattcttggcagagctaagtacaaaagaacaatatgtatttcgcataccaaatggatctaagtcttaagtgttatttgatgtctcgaaatgtttggctttcaactttgtttaaatgaatagtgtgtatacagtgaagacaggctttacttagccatgcctagaccctctgtggattctctcataatcctcagttattgtaaaccatacttagtgagaccaaaaggatattttgttttggctgcatggtattattggaaaacggtaaaaattttattctttaaataatgtgtttttctattcagaaaaataatgtctatagagatagttatttcaaaatgtagttttcaatatgcacttgtgggtatgaacatgaacaaacacatgcagacacacagagtctgacgttatatctagaatgttgaatcctacttttctacttaacaggaatgtttccctatgtaacgaaaaagtctgtataatgtgtctctattatgtgtattatatgaattatatatcctaatttacttaaccattcttttattgtattggtcattttcccatattgcatacaaattattagggaacatctgtgtgcaaacatttttatttacattttggattatttacttagaatagattcccggaagtgaaactaccaggtcaaaggcttttcccaatttatttttcaaaaagaaattcccactgtattctatacaagtatgcttgtctcactgcccagttgctagccttacatggttttttttttaattttgttttttataaatagaatctcattgttttagtttgtatcttttggattactagtgagtttgaaatttaaaaacctgtcttttcaggcctttgtcttttagggtttttaggattttcttaacgattagcatcatctcttctctaaaaacgttatatttgttcgttatattgtaataggtttttttttgcttttagctattaagcttttaattatatacttgatttttaatttagaaaagtaaaattttcttcaatggagttcttttttaaattgaattctttgacatttttattattttgttcaaagaaccctatgggcaagtggaatcttacacttttattacctggatagcggataacattcatagtttgatatttaatctgtagcatatagttgacttttatttttggaatatccttgctttaaaactacaactaaaggaaggcagatggttagcttgttttctcatttcctgaaaatgtccaagattggaaccaatattatcagtctgtaatggaggttggcaatgtcaagatggtttgtatccatgtcaagatgttgaatcagtgtccaggtcattgctcattaaagatgttgctctttggataaacaggaaacccagaaaaaagattctaacaatttttgatgctacctcacattccttcgagacagtgcagaacatttcgttctttagaaaatattcaggtctctttctttgtgttacagcacttactatttgtctatttgtattattggcttgtgacccttttttggggggttacaaatacactaggggaaagagtatttttaaaaatcattatgcctttgctttatctatgtctgtatactctcctatttgttattattatttttatttttgagacagggtctcactctgattgcctaggctgcagtgcagtggtgcaatcacagctcactgcagcctccatttccccaagctcaggtgattctcccacctcagcctcctgagtagctgggaccacaggtgtgcgccaccatgcacagctaactttttgtatttttagtggaaatgggatttcactatgttgcccaggctggtctcaaactcctaagctcaagcaatctgcccacctcggcctcctaaagtgcttggattacaggtgtgagccaccactccctgcctcctatgtattattctatatgtattttttcatattaatgtataagttttttcaagtatgggttattccatttgaacaaaccattaattctctgctcgtctatagtcatttcttattagatgtgtcagttcttaattttatcacacattaatttctttttttgttccttatacattttgtttccttgagatcttcagaatgtaaatcaatctccattctgttatgatttataatcatttacttctcagatgattcctcctttagtgctttgtgccttctgttatattcttattacttttgatcttttattgttctaatttcacctcttctcaacccatccccacactggcaactgttatatgaatggctggtcagatggaatccacatatgttccgtatgcatgtatagattttactcaagccactagtggagacactattcctacttacacatatgagtaccaacctctctgtgatgcagcaatcatatcttgacatatctagaaagtttcatcctcatccataaattacttcatctttctccaaataactcagggaattttacattaacctacccaatttaacaatttaggaaaaatcaattcagtgacatgaggtaaaagatgcgctgtcaaaattgcagtgtctctaaggtgattctttttgaccagactagaaacactaatctggcactattttagttggggtttcctggtacctttccatgccataaaaatctctataaaacagaacaaattgcacatttaattatagtttcaaaaatttgcattcttggatgaaactttttctcttgtcccactcttgccataattgctacattgtctactgttaatttgcattttaactgagctttaaacatttaaccagaggatggtccaatcggagattctataaccatctcagtaattggtaggcaagttattttttattgctatttcagcagtagggaagtctcctctacaggggtggggaaagagttgataaccttcaaaacagactctttactttggggctgtgatgagagaaacagaacagaagttaggaatggtgaaattagaagagacagatggtgagagattatcatgatttataggatcacccaaattgtctaaaatttactccagaactttttaccagttagggcaaaatgtcatgcttattttgagctcctatagatacatttaaatcagacatactggactttgcattctgttatttttttgaggggggtgatatttaaggagttctagaaacagcctacattagacttagtgtttccagcaactaacaaatttaaatgttataaacatttttctaacgcattttcctttaaaccactctggggaaagacatgaatgtaagatgactgattctcagattatctgcttttagaacaaccttcttttagctgcaaaaacgtagtgacggtgttctcaatgtgagacggggaagattttagtgggcacagcagctgttgactcaaatatagttatacatgttccttctgtgttttcttgtaggtgaatcagcagtttagtttattatgaaaattagcaatctataagatgattctgaaaaatgaattctcagaaatttaaggtacacacatggcatgatttggtgaatatgaagtgctgaagtgaaatactcatatcccattgtgatcattgatgttcttgttgcaattatggtcatcatgtcaagaacaaaatcaatttgatgcgattgaaaataacaaaaatgctttatgtcttttagagaaaatataaatgattcattgtaaatgagaaacctcaaactgaaagcacataaaataccaggtatgagtgttgcattttgaagtctctgactacatgagagttgtctgtgaaataaaatatccagttacacaaaatattctttatagttaaaaaactttttttcatacatatcactagttaactatttttagtcccatctttcctatgtgcccagcagtgagctaaaagctgtgcatttaatgcattcttcattgtatttttgttttgttttattttgttatttgtaaagatgggaaagaccaaatgaaaagatgtcaaacttttctgggggtggagaggacatttgcattttgaatttagaaacctaaattagaggtttaggaagactcataaatatgtagcagaggtttggtggtcacagctagaagctgaccaccaccatggggcaaataatgatttaacctcctcctgtaagtatttgatgtaagatcatcggtatatttcatctgtgacattatccaagaagaagatgaatctgagggaaacaatgcttgcagatttgagggggaaaaatgcttggagtagttagtctcgggatagccctaggtgatgataatccttgcacaaacacagcacactgttagaacagacaaaagtctgcagaggttaagaagacccttgttacattggaatctttcaatcacttctagaaatatgatttagttaaatcaatattttatttagctctaggtacaatattgatgctaaagaagttcttgttgaaccaacaaatggatgctcctttaaaatgctggaggcatcataaatggcatgttagcatcaggtacctccctcttggagcttacacataaaaacaaatgtacacaaatagcaataatcaaataaaatattaggggattgtgtcaaatgagagctagtgacaactgttgatttaaagattcagccatttcaaagttttagaagttttagggatataaactaaagagtccagagaaagcagggaaagtataaactatttctgccaaggatggggattttgaggcaaggttggatattgctattaggaagaagtggcatttgagctgggtaggatttttacattcagaaatgtgaataggcacgtgtagagaaaaggaggcagaggattctggattgagggaatttattaattcttcattctacatttgctgattacttcctatatacaagatactaaactaagtgcaaggcacacagggtaaataagaattttagttcttgtctttgaagagccttcccgcagtagaggaaacacgtacttacaagaggcaagcaatggtgccctaaggcctgaagggggcgcctctcctacacagcaatacgagggtggagtttattttcatggcacctcaacccatctgacagctaggggagctgcattttccaacagaaggtgcattttgtatatttgtaggctgttttatacactgctttgtgctgaagttattcaggcatttctcttccctctagaccttaagttcatggaggccacaagctaggttttaccatttttgtatccgtctgtgctgtctagagtagtgccttggacacacagtaaggattaaagactttcggaatataattaaattttgcttttactgggaaataaaatatatctcatagaaggcatggttgtcctattcttcatctagtctttcaaagtctttacagtgtgttgtgtggcagaggccaacagtagttaatactgtgttgaagccatacctttcatacttgatgttatttttgaacaatgaaaactttgcaggaagttctcatccctttgtggctaagatattttccattaagggggaaacaaaaagagaaacattagcaagctactcatttatttcttttaaagttacttgttagaaagtcacctttcaccccaatttcacattgaatttaagttcattcctacctatctgacagtaagtcaatattctgagattgtttcggaggcttcttatttttcctcagctgtaaactgaattaccttttaaacgattttctagctaacagtaaatggtccataaaacatatgaataaaaatgaaggcaaacatttcatgcttaaatagctataatggtagtcggtgtaatgggctggagtttcaaaaataaccagtgatgaatctcttagcggccacatcatattatctgtggtttttgcagaagtgtcatttgcagctattctgacacacatcttactctagttggcaatttatgatgttttattctatgtaaacaaatgtctgtctatctttagagtacaaatatctacggagatcaaatgtaagaaaaaagtggccctgacttggtttcattgttgtcaaaaatggtctttaagaatgttgtttttctttagacaatattacttaagtatctacaatggcttgttgtatttcatgggaatggtattactttacagcttctgccagggtatgtatcaatcttctctctcactaaggaaacagacaaattctgctatttcttaaacagttttttgtggcacttataagaattatcatgtttcccgggttgttgtgacagactgaggatagctatgcctgaattcatggtgacggtaaagagaacgtgtagtgttaaacgggcgtcctgtttgcctgaagttgtccaatcaaaatgtcttcattgataccagctattttcttaaagctctgtatttgctcagaggcactgaaatgttcctttcccctttccttgtgcactctgaaacattttagaatgcttttcaaatcttgaaatctggtgattgcatttgaaacagttttataaacatgcaaacccactcatgtgatctgctgggttttcgttgaaactgccactcacatgccagggtttgtacaaatagacctgaaaggaattctcaaggtcattttattgcaatccatatttgatgaatttgggaagttgtgggcaccacgtcactctgtgaacttgtagcagggagctgaggctggtaaggtagtatctctttattttcactttagtagtgttatattcacacatagcttttcttcttagggtagaagtcttcctctgctaacctttgatttttttgaaatttcatttttttaattcttcaactcccaaacagattcgttgtttttcttccctgtaattttttatttatatctgtgtgttttgattaaggttactttctagttgtaatggggagcattaggcaggttttttttttgtttgttcttttctaaataatcaggactttacacaaagttacaagctcaataagcaacagccgaatccttattctacatatttttcagcagagtgccttatcagacactatgtcctctctaaagtctgcacaccaatgtctatgacattctagacagctattctttagtacacctttgtacttcaggtcccctttgtggcggtgcatgtttgccaggaatccaaaatctgttaatgactgttgtacttgctattatattatatcatataattattatgtagactgatgtaacatataagtaaagagaagtgtttatgtgaaaactaaatagaatgctagtaaatttgctaaaaaaattactgtagaattagatgtaggtgagccaatcataaaagattgggaggaaatgtgaatgattcttagattgcttctcaagtgccttaacttctcaattacaaagaaacactgtaagccatagatgatgcataatggatgttcttgatgtaagacattgtagaaatctaactaagagattcaaactcaaagcaaaggccttggctctacatcaaaagagtagccaactatgtgcatttaagtgttgccatttataaagaatacttgaggtattatttctgaagattcttgactttaatatattcatttaacaaactggccaactacctatcctgaatatgtcatatgagagggcttctaacatgagaataaatcacaagcctctagctgttctctattttaaagtggggatgaaaggtgaacaaagtgttacagattctcactatttgagtatctaatagtgatggggaggctgtcctgttgccttagttgtcctggagaaatatcatcggggcctcttttctgtgatgcagctcatggcagagtacaccactgtcatcctaaacttttagctaaaagcagataacacacttctttttcatataatgcatttgtatctgaattaggactttagtgttacggttaagacctacaggcattgattactttggggtgaagtctggtgaccaaagacagtgttcctaaaaagtgcaacttcctgggagtttccacacctagctaggagattgtctcagggactttttacccagaagataactctattattggtaggcttaataatagcagaaatacaggctaccttattttcatgattatgcatttttaacattaatttttaatttccttgagatcaggtaatagaaacattaatagctctctatactaccaggcatagttacctaaaacaaggtgagtgctaaataggtgtaaaaataatgatcaagctcccaaagtgtactatttagttattttgcatgacaattttaacagaaatttgtctcctatcacaaattgcagttttaccatatcaattagttggatcttgtctcatctttccgttcactgtgctacctagtgtggatgattctgcgtattttaatgttgagatgtgaccacactgtattcattcagctggtttctcagaactcgctgaatatgggacagtttttttttttcccagtagtgagcttgactctgtgcataggaaatacacgcagtcctcatgtgcctttcccttttctgcagatggtagttcatgagcctccctcaaatataacagcagctcataggtgaatttatcaaagagtatggccaccttgggagacctggcacattttacaggccctgctgtgatatagaacaatcaactcaatttttttatgtgttctttccattattgtaactcccatgaggtaaagtgttaagctacattaagcctcattaagagaaatttgagttcatgatgcatatgtaacttcgcagtaattgtaattagtacaatctgcttcttgaatttgctaacatatttgggaaaaatgttaccattttttatttcttttaaaacatttaatgccaaaaacttttcagtagagcatttagtacctctcacaaaatttcataagtggctttgattgtgtgcagaattacatcaaatgattaggagcagacagttcatgaaactaagaacataatttacaacatttgtaacaaaaaagtatactttgagtctcaaagtatgagtaaaacctgaaattgaattttttgaagtcaactatctcctatatattaaccaaaatttatgaaaaaatatctatgacaaaataagacaaaagatgggcaatacttctaatagaagagggagataatgcattaggaagcactctctgtgtagatactaatgaacctgagggtataagatggagataatattagaaaacatggtaatatagtacatactgctcataattatagtcagaaattttaccacccctctcagtaattggtagagtaagtagacagaaaatcagtaaagatatagaaacttgaaaaaacaatcaaataactgcatcaacattttagaacactccacccaacaacagcagaatatacattcttttcaaatgtgcatgaaatatttaccagtataaagtatattttagaccataaaatatatctcagtacatttaaaaagatttcggactatgttctcaaactacagtggaattaagttataaatcagtagcagaaagatgcctgggaagtccccagatatctggacactaaatatcatgcttccaaataactcatatgtagtggattgaactgcagcctccaaaagcatatgcctatgtcttaacccttggaacctgtcaatatgaacttagttgggaaactgatctttgaagaagtaattaagttgaggatctccaaatggaataatcctggattatccagctgggccccaaacccaacaaaacgtgtctttataaaagaaagaagacaagaggacatagatacagagaacatagtaataacaaattttatttgtttcatttgaaatcaacaaatttttaatgatgatggactccatgtggtttctaagctggagcttctcattatttctatgaaagccacttagaggaaaaagaatgttttcactgtcactgaaaccttgggatcttcatattagaccaaattaaacaagttaccacaggacttccaacctacaatatgctaatgcactcttcaatcttcattgatcaaatgtagcatattccagatttttttttaccgtataatccttttttccctgaatagtcttgcctgacaaatagagctcattttgagaaatatatatatatatatatatatatatatatgtttatttctctcttgttctttaaagattaatttctgtatcacatgaatttctgtatcacagaatccttttagattctgtacactaggaatgataatgacttacttgttttatatgttgagtaatgttgtttaaaacgatgttatttctattgaaatagagtatctctcatttttttttccttttttcctgttggccagtctggagtgcagtgctacaatcacagctcactgtagactcaacctcccagactcaagtgatcctcccacctcagcctcctgggtagctgggactacaggcatgcatcaacaggactggctaattttgtacgtttttgtagagacagggttttgctcttgcccaggctggtctcaaattcctgtgctcaagccatctgcctgcctcagggaggcaatcccaaagtgttgggattacaggattgagccaccatgctcggccccttcttttcttattcttactttttctattatttttcacttcttttactaagtttattattaactaagtaagttaataattaacatttcttttgcttaatttttaaaaaaagggttggtcatgttaaaactgtcctgaataagatctactatctattgaaataaattcttgttcctttcataaatttattatcatttagaataattctttgtaaagatttcatagatttcagccatcgtagttggtatactacagaaatgacagtggggagagacaggaataaagttaaagtagtgtggatatagaatcagtacatttagtgactttttaggaatggcaaataaaggattattgtaatttctgttttggtttccttggaggttaatatttcctactgaaatagggaaatctgaaggaagagcaaatttccacaggaacgacaagaagtttgattttggatttgtgtggttttgaggtactttcttgtacgtttggagaaagtatctaacagggaattctgctactgaaacaaagtagagtgagagggaggggtagacttagctcccctgaccttgtatgtatggagaaagtatctaacagcgaagtctgctactgaaacaaagtagagagagagggaggggtagacttagctccccctgaccttgtatgtatctctttttcaatatttatttctaaactagtttgacaatgctgcctatgaacttaagcaggtgcctgaaatgattgaaacgtccttgtcagcaggcagtgtgtttcacatgttaagttcagtaatggtgaacttaatgtcctctgctatattgacctccaaagccttagagatttgtggcctaagaattacaccagatagatttttatctcagcccttattttagataataaacatatttttaattagtaagttaataattaacatttatagagccttaatgtgagcctggccctgctatatattatttatgtttaccaacttgcttagctctcacaatgatgctatttactgatgaagagttaagtaacttctcaaggcccatgatgcatcctgttttcaggcatcaggtgctgagggtttgttccagcagcctctgacatctggttatatgaacctgaggccacgaagtgtagctctccctgcctcagattatatctataactttggcttgtacttgttcctggtttgtttcttactctcttgttttatttaagctactgttagtgacttagtaatgttttcagataatttctattctgcaaaagttaaatttaattatattcactaattattcatcctattaaagaattgagacttccaggaagatggagtatacatagctttccctattcctcctgctaaatacaactaaaaatcttggatattttatatatatgtgtgtatatatatttatatatatatatgtatgtatatagaggaatactctgaaatatggagagaaggcagaaggcagactagcttggggccttgggaccaaaagaaaaacatattaattgctgtgtcacatgagtttcaatcaatttagattccttactctaggaatgataatgacttacttgttgcatatgttgagtaatgttgtttaaaacgatgttatttatatagaaatagagtatctctccttttttcttttcctttttgagacagggccttgttctgttgcccagcctggagtgccctgggttttctttttttctcatatataccagacttggagcttaagaaatcaacaacatgggctgagtgtggtggctcacgcctgtaatcccagcactttgggaggccgaggcgggcggatcatcaggtcaggagttcaagaatagcctggccaatatagtgaaaccccatctctactaaaaacacaaaaaattagccaggcatcgtggcagtgtctgtagtcccagctactcaggaggctgaggcagaaccatgtgaacccgggaggtcgaggatgcagtgagcccagatcatgccattacactccagcccaggggatagtgtgagactctgtctcaagaaaaaaaaaaaaaaagaaatcaacaacacaaaaataccaatgcattacatggtaagcaaaaacattcttaacaaaagcatgctttctataattaaaggaccagagagggtcaacctaacaagacaaaacttttagataataaccaccatattccaggtaaataacagaaaaagcattgtggacccagtcacatctatacctgcaaaagccatgtcgggagcttaggtttttacttttttgagattctgatgaagtaccccaatgtccacactgggatagtgtcagaaaaggcaaggagggaaccaggagttttatcatcactgagctccatttctattctcagtgtcagtggagaccacatggtaattctggacttccaaagccatctggaagtaatagggtgctctttcttctcctgactgggctggtgtccgtggaggcctagacaatattcaggaccttcaccactgccctatgataacaaggccaccctcattacagtgttccaactgggagttggaactcctagaattctcaccttcacccagcagtaataaggagcctcttcctaagatgctgaatggggaatctgggctttgcatccatgtggaaatcatgaggcagtaccacctgccccttcacctgccagagaagtgtcagagaaagccaattaaaacagaagatttaaataagaaatggcatctcttaacataatttaaaaatgaacaggttttaataaattattcttataccaagaactagatctcaaaatgaaggaaaattgcaattaatagataccaacactgagatgacagaggtgttagagttatttgacaacagttttaaaatagtcatgataaaaacgcttcaatgagcaaatctgaacacctttagaatgaatgaaaaagtagagaacctgaacaaggaaagagaagccctcagcaaagaaataaaagagaaaaagatgagccacgtggagttttagaactgaaaaatacaataactaaaagaaaaagcttagtggatgggcagaatacaggagataaaaaaataataaaatggaagacagaaattacctagcctaaacaacagaaaaaaaataaatgggaaaaacaaaacaaaacaaaacaagagcctaatgggcccatgtaattataacaaaagatctagcattcatgtcatcagagtacagaaagagacgagaaagagggatgggatgaaaaactacttgaagaagtaatggtcccaaacttcccaaatttggtaaaacacataaacctgagtgaaccataaacaggataaacccaaagaaattcataccatttcataattaaactttcaaaaatgaaagacacaaagaaaatcttgaaagcagccagagaaaaattattccttacttatataagaaaatcaatgaaatggcagtagatttctcatcagaaaccatggagaccagaaagaagtgacacacatttttttttatgtgctgaaagataagaattgtgacctatactgagtgaaaacaccctctttaggaatgaagaggaaatcaagacatacttagataaaaacagattatcaccaggagatctgctgtaaaagaatggctaaaggaagttagctaagcagaaaggaagtaacataaaaaggaaccttggaacatcagggaggacaaaagaacatggtaagcaaaaatatgtataaataccatagactttccttctcctgagttttctaaattatgtttgatggttgacaaaaattataacattttctggtgtggttctaagtgtatgtagagaaaatatttaagggaattataagtgtggagggttaaagggacgttcaaagaggtaaggtttctatacttcactttaagtgataaaatgacaaaaccaatagactttgatacattaaacaaatatgatgtaatacctagagcagctactaaaaaagttgtacaaacaaaaagtaaaacagtagagttaagccctagcataccaattattgcagtagctgtaaatagtccaaatgcaccaattaaaaaacagattgttacctttttttgtggtaagaagacataaaatctattctcttagcaaaatttcagtatatgatgtaatattatgaactccagccctcatgctagtacattacatctctagaattctttatcctatataactgcattatgctatggtacacaggatggtttccttgatttcttgtttggatagatcattattggtgtaaagaaatgcaaatgctggtatgttggttgtgtattctgcagccttactgaattcatttattaattctaacagatttttgtggaattttgtatcatgtaatctgcaactaggaataattttacttcttcttttttgatatggatatatttttaaatctgtttcctctctagatgcttttgctagaactttcagtattatgttgactagaagtggcgagagtgaggatccttgtcttgtactggcttttagaggaaaatccgcttttccccattggatatgctaattttcttttgtttgactgtagtaatcattttattatgtatatgtatataaaatattgttttatataccttaaatgtatacaattaaaaaataaaaataaaggcacatgatgtaaaggaaaaaacaaacagaagaaacttaaagcaaaacaaagcaaaaaacaaagactggcattatggaataaaaaatatgacctaactatatgctgtctagaagcaactcacttcaaatataatgatataggcaagttcaaaattaaaaagataaaaatgtatatcatataaatattaatcacagaaaagcagaaatagttatactatctgataaggtagacctcagagcaaaaaaaaaatactagtgacaaagaggtacattataaaatggtgttaaaagaaaaactttagacaaattaaatttaacaagtttaatcaagctaagaatgattcgcaaattaaacaacccccagaaccagaatagattcagagcaactctggcactgctgtgtagtcagagagaatttgtggaaagaaaaaagaaagtgatgtacagaaaatagaaatgggatactgaaacacctggattggttacagctgggtgtcttatttgaacaaggtttgagtagttggctgtctgtgaatgctaaagtatggctgctgtgattggctgagactctgctacttacaagagtaggttgctgtctatttacacaccctgttaggttacagttcactatatacatataaaccatcaggcctaacttaaaatgtgtaaggagtcagctttaggcaagtttaattaggcatggtaaaagggtcacttcaccaagaaaatttagcaatcttaaatgcatatgcagacaacagagctgaaaatatccaagcaaaacctgatggaactgaaaggagaaatagacaaatcttcaattacagttaagactccagcccttctttctcaacaattgatagaacaactaggctataagtcatccaggatatagaaaaactcagcaccatcaaccaactggatctaatcaacacttagagaacattcctttcaataacagcaaaatacacattttccccaagtgtctatagaatttataacaatacagatgattaggccatgtaaagaacctcaaccaatttcaaaacaattaaatcatacagagtgtttgttctttgaccacagtggaatcaaaccagaaatcaataagagaaagataatagaaaaatctgtaaacatttagaaactaaacaacaacagacttctaaaaatccatggattaaagagaaactctcaagggaaataaaaaaaagttaagcttaacaaaagtacaaatgcactataaaatttgtgggacacaactaaagccatgccaagaaaaaaatgtatagtaccaaatacatacattaaaaaagagaaaaagactccatcaataacctaaacttttacctcaagaacctagaaaaaagaaggtaaaattaaacccaaagcacacagaagaaaagaattggttttgtaggctgactggggaaaaataatttatacaaccttgcttctgttaaaaaaaaaaacatgagttcaaaaaacacattgtggccttcaaaatgccaataccctattaaattaccagaaattaaaattaataaattgattgatggttactgtaatgattaagataatggttacttgtggtgaccttttttccaatcataaccaaacatatctctggaaatgagtcactaaggatgatgcagcatctttctttctcttttgattaatcaaaattatattaaatatattttatcttatattaaagaacagtttagtcatgaatttaagctggtgttagaggatagctaagttgcttctcatagtcatttccttacttatgtaatgaagagcagaaaaatatttttaccagtggttctcaaccttggctggaaatcagaatcacttagggagcttaaaaatatactgatgcctgggtcccatccagcgagattctgaattgttctatggcagaaattctcaaaatacagtattagcctctcagcagcagcagcagcacttggaaacttgttagaaatgcaaattcacaagccccatccctgatctagcaatctctgttttaacaactccttcaagtgattctgaggcagcaggtctcaagctttaatgtgcatgcacatctcccagggaatcttaggaaaatacagattttaatttgtggtctggatattacacactgtcacagatgctaatactgctggtagcaaaaatataatttgaattacaagggtccataggacatctggatatttgcattttaaaaaattttccaagtgggaatgcagccaaggtgaaaacaactggtctagatagctttatggtacactgccaatagcccaagcaatctgaatgatctctgcttggttttctgtacctgaggttgtagagtcactgaagagcacatacttcttgttctctttaaagtgataatccggctggacatggtggctcatgcctgtgatcccagcactttgggaggctgaggcgggtggatcacttgaggtcaggagttcatgaccagcctggccaacatggtgaaaacctgtctctactgaaaatacaaaaattagctgggcgtggtggcacatgccggtaatctcagctacttgggaggctgaggcaggagaatcgcttgaacccgggaggtggaaattgcagtgagtcgagattgcaccactgcactctgcactccagcctgggtagcagagcaagactccgtctcaaaacaacaacaacaacaacaacaacaacaacgacaagaaccaaacaaataacaacaaaataaaacctaaagtgatgatcactgattttaagtggctccttagttgcctaagaatcccagttgtgatggttttatcccttattgtctagaactaatgttgaacaccctgctttttaacttcatcttgtttttctctacccccatcatcaatatttgcctgactcaccatctttcaaggtttacctcttcatactcagctaaaaattagctgatgagatgcacaaataattccagtgtatcaggagaggatcagcttcctcccttttaaggtaacatggatcctttcaccatctcctgatgccctgagaccaatgtcttgagagcatcacatcttgtttcatgcattctgactgggcatgctcatctattccagtgttcccaagaaacactcatgtattgatcactccgtggccaggccagatctctctctggcttgtcactgagtggacattttttttttgatttctcaaagtcacctcaaattcagtgtgcccagactagaactcatcttccctaccatgtctgcgtctcctcctgcattctctgtttcagtgataagtaacttggggggcatttttgattctccttccctcttttccaccccaaatggaacttgttgttaggatctgtggattctatcactcttgattccacctacttttcaccattttgcctctacttctctggtgcaggtcttcaccatctcttgcttaattgctgctacagtgtcctaactaatttccctgcctttagtctgtctgtccatctctaatccactttccatatggcagtgagaatgtttattcttgccacttcttagatctaaaactctttagtagctctccattgctctcagaattgagagtccttattatgacttaaaaattattaattatctggtgcttgctcaccttccaaggatcttcttttcaccttgaactggatgcattttccgtatgtaccattttctctgtaggttctaagcctttgaagaggtgatgcctctgcttggagtgtctttccattctcccatttgcctagttcttattctttttttatttgctaagacactacctctgaatagatgacttccttgaccctgcctctctcaagggtgagttacatgccctcttcttatccttagtgttaaaattaccacactgaccttcagttccctctttacttgtttatcttcctcagtagctccttaagaagggattatcttcttcactctgcccttagcatcaagcctgatgtctctattatagtctgtgctaaataattattaataaacaaaatacccagttagtgtaaggaaaggaacctgccatggtaaataagtgtgagagaggttttgaggtagtcgtataactgttagaaatacacaaatcacattatagatagtggcttctctgtttatcacagtgctcagtttcttgttccaggatatttagaaaaagtatacctaaaataagcggagaagtcattaggttgaatgacatattcccttctgccgaggtattataatataatttttaaagggcctcagttaacaattaaattctttatatccttgcagcagttctttttttctaggtttcatttccttccagaactagatgaggatttttgtctaactgatacaattccacgttctgagtccttgccttctctctctttcagtttctgggttgtatgtggtagattgcccagtctatacctaatcagcactaggttggagaagaataaactgccttcatgttgtggagctggcagtcttctctgttgagtgataaaccaatgccattctaaaagatctgcagacctgtgtgatctcttcttcgagggagctgtaagaactaactttgatggaaacaccagttttaaaagattgcagttcatttcctacatgcatatttgcctagggaaattttgtaacatcaactgaagtttactaaatgaacagcaaatgaataagtatacgggttgatgacaaacactccagcccaacatctctagggcctttgccaatgtttcactagaattttggaccctcaaggtcatcttagttttaccatgttctcctgatttgtgttgtatggggtcatcctctttagcaatctgcagagcataattttaatgctgtctcccaggtggagggttgatgatccctttatagaccacattctagcacaaattaatgtcactgtttcttctgtaggaggagcctggcacactgaataccagtggagtcttgctctctaggcttatcttgggagctagtatgcttattcttgtttctgtccctttccttatgcactgccacaaaggaattgctctagaatccatttcttcttcctcatctcctccgtttctttgaatcttattttgtaaagttcaagcttcatttcctgcaattagggaatagatcatggtctctaggtgctttgtcattctcaatactgtgtgccattcttttgaattacttcatgttcctttggagcagaggttgtatcttttactttatatggaaaagtatggcttagtgcagcgtgtaactcagactaaggcaatttaaatgctgtatttcatttgaaatgacacatggagctgtttttaccacatttctcactgtcttatctgaaaaccagattagcgcagggaagtcttggagctattaaaaccttctcctcatattttctctggctttcagaatgactatatagggccttttctttggtggggattacacctcactggctctcatgtaaccagtcaattttcctctcacttattatgggactgtgaaagaaagaattagaaggtgaaattataggattaatgttaaaaggaattagttagcttctttgttcctttaatttccagttacaagaaaagaattagatcaattacatttctatgggcttgatctcatgtaatagtagctattaccaacaaaaatataaccaaattggacttttaagaatgttcacagcagcattgtttataatggcaaaacattagtatcaacacaggtgtccaaccacaggaaaacagttagataaaatgtaattaaatccttatgataaaatgtgaccattaaagttgctgtttttgaagaatttttaatgtgtgaaaatgtgaaaatgtgctgatggtatcatcagcacctagtaccagtgcctggcatgtgaaaacagcttccaataaatacatatgtaatagctttatcataccaggaaaggtggctatagaaaataatagtaacctcgtactaaaatgaagagaacatcaacttcctctctgctagatggccactatctgcatcttttattctcttgagtattctggaatcagtaaaaatggtgttttcaaagaatcttatcagaaattcagctacatctttgcttggcaatctgaagtttttggaaagaacgtatttcaataataaagaatgacatagaaatttttacatggtaaatatttaaataaaatatgacattttaaatttaagtccagggttactgtttcagagctgaattcagacatctgaatgataagcggagatttcattgagaaaatctctactttatcattcctactggctttactatgtcatggagagctcaaaatgtcatcactgaattagttttctagctgacttcctcctggtggtgttttatatgttagtgacattgatttctggacttttctttttcccataggtcttacctcatttatttgaaatagaattgattaaaataacctatagaaataaaaagcaaaataaaacaatagagataaagatgaaaaatgtggtataatttttaaaaattaccattctaggtatatagtcataattatgaaatattattctggtctgaatgatacaaactgctcagcttttatgctttagaagatatcattattaataactaatttattagatttgaacattcaagagcaaagagatgttacaccaacgggttcccttgtctcctactttctagtttatgtaactgtaaatgagtaccctagattatcagttgctttttggggatatgttttgttatgataaaaagaagcagttcgatcatgacatttgcagttatctttcttgcagtgaccttctagaaatgactcttcaccttcctatctctttccctgtcttggttcatggtatactcattctttcaattgtgaaagtagaaagtcagctgactctttgattcttctgtctccctctgaaccactgacttatggcaatttccctttagcatgtgttccgtatctggaccttcatgttcagtctcactgtctctcccctggttcaagttctcagataaaaaccgtttgcctttagtcttcccaagcctttagtcttccccatttcaattcatctcctgtactatcataagataaatattgattttgctctttttgtttctgcttccagctttattaagatgtaaatgacaaataaatattgtgtatactgatggtataaacgtgatgttgtaatacatgtatacattgtgaaatgattaaaccaagcaaatcaatatattcatcatcttacatatgtataacttttttgtggtaagaacatttgagatctactcttttagcagtttttaagtgtccaatacattttattaattgcagtcaccatggtgtacaatagatccctagttctggagattttgctattttcttgcccaaaaattgttagtagctattaccaacaaaaatataaccaaattggtcttttaagaatgttcacagcagcattgtttataatggcaaaacattagtatcaacacaggtgtccaaccacaggaaaacagttagataaaatgtaattaaatccctatgataaaatgtgaccattaaagttgctgtttttgaagaatttttaatgtgtgaaaatgtggaatgtagcagagcctaataccatataaatacaaaatacaagaaacatttatgttgttttttgtatttttttgagacagagtcttgctctgttgcccaggctggagtgcagtggcacgatttcggctcactgcaacctctgcctcccgggttcaagcgattctcctacctcggcctcccgagtagctgggactacaggcatgtgccaccacgcccagctaattttttaaaatatttttagtagagatgggtttcaccatgttggccaggctggtcttgaactcctgacttcaggtgatccgcccgcctcggcctcccaaagtgctggaattacaggtgtgagccaccgcgcccggccaagaaatatttatgtatatatgaatgttagcagtggttatttctgagtggctcaataacagcagatttttctttttgcctacacttttcaatttttctacaataaattgcattgtttttataatcagaaaaacttcctctaatgattggtatctgtaagaaagcttgtaagttatttagtttagttggtcttaatatatttttggatcatgggcctctttgaggatctgacaaatgacatggaacttctctcagaaaaatgaacatctgcccatagacacaaaatatggcatagaacttcagtaggattttgggcctcagatcaaagagctttttgatagtaagcacaatgctctcatttaagagatgatggtggacccagaggatctgcctgctctcccacaggaggctgggagcagaggcaaaactaattcttagtactttaagcttttgccttgaaactaggctgtccaggagacttgagatcactttgcaatgcccttcattatgtgctactgaggtaccttctgtaagttgctaagcctgtgaggtagccgtccacacccgaagagggtcctccctatggtggttactaatgttattctttgtagtagtgccaaagcttttccttttggtaaagataagcttttattggagagacctaggggagtggcttctaagtcagtggtgggtcctagaagtaagcaaataaaatgtgcgcctcccattactgaattttgtatctattactttcttaaacatttcctctcagatttgatgattttgttgtaaacaggcatgatgaaggctttttttcttgagaatgtttgttttcttccatcatctggcagttttccttatatgaccttgactatggtggtaacaggaatgaggcatctgtctgctctagaatttttcattgtgcttggtgctgtagcggttctctctacctggtgcctgcacagcctgcatgattagggcttggaaaggtctcatttcctctggttttaagtgattttgttctttcatagccttaagttagctagtaagtgagggaaaagtaccactaccagcaccccagagccagcctttgactgggaatgaacgtggaagagtgccctttctttgtcagaaactcctacagcgccctgataaatcttgccacagacagcagattttacaaataaaggagaagtgttttctttggtgcaaaaaagacagcaaacacagatctggaaacagctgtctgatactttttttgcaagttgttaagccctctacagtctaatctctgtggagagccctgaatcaaaacagaggattgaatccctgaattgagcagaggaattgtggaaaaggtaaggaaatgaacttttttgatgcctccaagtaccagcactggccaaggtgctttcatagatgtaatattgaatcctaggaaaaccctgtgaagtaggtggtggtggtcttatttttacaggtgaggaaactgaagcccaaagcgtattttgctgaagtatacagttagagacaaaactgagtatgtctgcttccagtcaagctctttctcatctataacaaataggttgtatgacagcacatggttttgaagtgctctaattatcttttatgtgtatgtgtttcaaatatttttatttatatactatgatctcattaataaaattagaaaatacagaaagatataaacacacacacaaccctcacatgaaacagttctactccaaccacagccgcttgtagaccctgatagataataactggccctgatgaagatttcctctcctctctcatctctttgcttatatgctgttgtatattttccaatcctttcctcccaatcatatttctaatgtaaatgtaacggaaacacacggacagttttacgtccttattctatatgtattggcgataactttttgcatagcgcttcattctgcacatagtttagtgttcccccactgtcatcttcataagatctgcctgatgagaggaaaagcagaaagagcaccatagtccctgaacaatctgggcagaaacacatgggtttgggataatacacgtgcacttttcttcactcctctacatctgctcaagatgaaaatggttgggacattatcattttgtccatagcacaggagaacatagttaagtcatttggttgagcctggaatgcaagagaaaatgtgtctactgacattctatttccacttcaccgatagccctgagaagacagaaagatgggtataacttgggtgtcttcctcctgctctcttagaaataaactcttgaaacttattgactagattgtatatccacctagaattgggccagagtgaagactaatgcctacagtatgcacacccatgtttgggtgctgtcagagctcaggaaacagaagcctggagattgcctagtctcctgccctttgcagattaccagcaagcatcctctcaggcacagactgcccaagggtgaagcagcagcagcctggagaagctgccaatggtaataggatgccaagaaagaaaagtgagcaaattagaaagatgcccaccagcacttatctatttggaacccaatcttttctttctctacaaaaattttagattgccagactcttgaacttcaaggtttccttctttataaaaattatattaaaaaagtactctcattccactatctatgtctctccagagcctgctttcatggggctttccaatatcctgctgtggggaagcaaactgtttgcacttcttgcaagagatttaacttatttaatcagtttccctctctctctttctcccttgcatttactgatgataagattgtgttcagggtagaaatttggctgcctgtttgagtgacaacagcggacccagcccttgtaaatgtctgctccttcttcccgctgcatctagtttcctgccttctgccaggtctcagcaagccctgtgaggcaaagcaccttcttccttctactgtggacagctgcttctcccaagctgtctgccatctcaggagggaccaacgctctttgcagttctgtagcttctgtcctgttcttgtgaacttatgttcactaatgtaaatggggctttatgtctttattgactttgtagtgaatacaattgtcagagaggctgcttcaaagaatcaccttgctctcctctgccctgactcggggctcagcttggcaggaggtgtgatgtctcagagcaagtacagcattttttgaaggagcaaggtgttaatggcaggtgactctggccccttttatgtgcttgagctgttttgccaggtacagagtgggagtggaacagaaaaagggttttttctagtctagggtcccaccagctaaggcctcctgattgagccatctgtaatcccagggtggaccttgaggcagcctataaatcattctctgctctgccactgtgtcaggttaaggcttggaattaaggttccaagagaggtaaaaggtaaaaccaagagctcatcagacagcctgaccacaaatttccctctccattgtgctcctgtgggtgaggtctcctagccaaatgactttccttatcttgaggaccaggcccagtatctgcttatccctgaggagtgggttttggttccctcacagcctgtggaattattcaaacaagccagtcacatcctcttgtggggaccagggctaccttgcccttctgttacttcaaaaccagcctcacataggccctgcctgttcacctttcctgagtgtggcccctgtgtggcctgtgtggggtgcattgtcctcccctgggctgtgagtagatatgactagcgaactgctattaatctcctctgttaaggttgagtgtcatgtggttggccatccccatatttctagggtgggaactcctccctcaccaatggggtaaagaagacactgcattcagcttttctagcctcctagcatgtataactatatttccacttttcaaccacttgccctctctcgtgtaatacactacaaagagaaggaaacatgcctgtaattttcatcatgatatccttggtgtccagcacagtgttccctggcacttgataaatatctgttggataaatgaatgagtgaattccaagggttctttctgagtaaagattccactaaatagtttctcctctcacttgcaaaatgttgtcactccataatcagggatggaatgaggggtgtgagcagggtgtgcacgtcacctctaacttctccaggttcttccaacctcagaggtgtcccaagcaagccaaagagaataacagatccttaggatgtatcccacacccccagttcagtgccatctcagtgttagattgatgtacttttcttgagataaacattgacagatgtcgctgaatttggcaaccaactgtacttcacatcttctgagacattctagtccacttacccagtacatgtgaaaggactttagtgcctccctcttttgttctctgggctatcttctccaattctgatttgttgatgtagatggctgttaccagcaacaatgagagcgtggggcctggggaggcagagagctttcattctagtgtttttgtgattgttttggctatagctaggccaaggtactgtcctattctgtttgtattgcagtcaaattaatcaacaggcatttttttctcagccatcttcaagtcgtgtcaggaaaaatttggcctacatgaggtttaggaaactatcttttatttccctttattttcatgaacatttgagcttgaggagaatgtgagcatttttcagatcattgggtcttatagtttcaggcttcatattttgtgcattcccacttctaaagctttgttttcatatatttgcccattcctccaatctaagtctcaccatttaaaaagttaagttcacatctggtttctggggaattgttgcctcatttatctttttgtctccttttcagaaatcccttttagtttattatttattttattatttttattttagtttattattttttcacatgtagtgtcactggtatttattatttttagtttattattttttcacatgtagtgatattatttttatttagtttattattttttcacatgtagtgtcactggtattaattttactaatttttgcttctcaaagccaaggactttgaggaattttcttttctttccagggtgccttatacagtgctctgctcataataggtgtttatttttcataataggttttcattgcttgattttttgatagcaggaaccaggtaggtatgcctctataagggtgaatgttgttcataggagacaaaataacaaaactggtgtcagtttgtttgagcttacattaaacgggttcacaaggcctcctgagctctgtgtattgaagcaacagaaaccatgaagcattttattgcaagagcaatcaggcaacttcccagatgttgctaaactctgctttaactgttgtgtagagctagttttaactgcatctcccactgctactggagacaatgattctagagatgttactaattgtcacttgttctttgcctagatttcttctctgctccttgtggcgtcacccagccgctagacgggcaatggattagaatttacatggaggctgtggtcacggttgtctcaggtgttaaggaacaaagaaaaagaggtgcagaaagaataaatcaaatcattattttaaaatgtcttagtttccaaccaggcaatggaatttaagggagattccctgacggttaccctaagacatctgctttggagcccttagcagaactctctctgtgggatgattggtcctaagcctcattaacagaggctttgcggctccattggaggttggtgcagcacaggtgggcgttagcacagaggtttataggaccaaacccacttcagcaaccagcactaattggctccccagggaagtcccatgagaagctgtcaatcgtgaagactgagtttttgtttataatatgtagtgatttctcctttgctgctctttttcctcccctatccaaactgcctttccttcttgcacaaataggtggtggttcccaaagtacagataattagaaagttgaggcaaaccttactttgattccaactgcatttttctccactctctattctccctaacccttcccctatccccacccttagtgtgaaacaataccctgtcatatgggaggaaccctcgctgaggttgtgctgacaaagctagaaagtagtgttgaaaaataaatgtacatcatcagtgcattttatgaagtgatttctagtttctgtaatgtgacttcaattatgctgaaaatggagatcttagtctcatcacgtacttttgttaaatcattgtattttaaggttaagtcacagggcaggaaacaccttctctgcaggatattgggtgtaaaataaagagaggctttctgtgtcctgggaatgttctgctaagaagacagtgatgataatagttaccactgaataagtactgacatgtgaggaactaccaggatccctgctttacaggaagaagccgaggctcagaagtacacttgtctaaggtcccagaacaagtgtaagtgtcaggatttgaacttaagtttgcctgattccaaaagtttctgttcttaaaagctgtgttttgctcatgttttgatttatgtttgcccaaggtcttttggtccaactacaaaaataatttaaattagttatcagaccaagcattctttccagtgtttgagggacgggagcaactcaggtgtagttgactaaccattctacattggtgttatttcgtggggtcaatttcagggccgtaattcagtcatagttattgccaaatccaggtgatagtaggctttgtgggtggtgagggtagattagaaggactttagcttgcttataatctcccctgttctttcttacgctgaggtagaaggttggtgaagagactagaaagacttgggggtaagttctcaagtattacacaaactgaaatttggttctgtcaactgcctagttatgggacatgattagtgccaacaggtcacagggggatttcacttcctctggtcaatatgatgcaggatacagggttgggggatgttcaaggaaataacaaactgcagaaacatcatttttatctgtttcatgcacacttgtggcccaggagattggtaatttcttctttctgataatacttaattgaagagacttttatttttgactagtacttacaggaggacttaagcccgatcaatgcaaattgatttttttaaaaaatcattaaaatttaaaccttgggcattatctttaggttgtaagtgctaaactcagcccacctctttctttcattatgagcaaaagtaatcaaagaccatcagtgctaattaattcagataagccaaaaacatacatattcttattttaaatgaaagaaatgttagtgttgtgattgtttttatattattttaattaaaagttaaatggaatagaaaggtaccaatttaattacatattgaaattcctctaaagccttctcagaagtacttccttttagttgcagattacaaaaagagatgtagggggaagatataagggagaaggagaatcagttcaaattgttttcaggtctgatttggcgtaggaaaattgattctgaaaatctaagtttggaaaattaactaaagcaactcttctcaaacataacctggtcagtgattaccatccaaacattcaaggttgtttctaatttgatcaagaaatggtatggaacaatgcacatgtaatctaaaccatattttagctgtaatttttaccttctcctattgtatcctatgttcaataaaataaatatctctagcaaagaattcaatataataatgtttccagtcttccttcatttttatgtcttcccatagggtagacaaaattccagtaaacaataaaatgatcaaaatatgagaaaaataaggagaatgagagacagtctctgggtggcatataaacaggatggccatcctctgactcacaggctgtcttgtaaggttggcaatgactttgaaattttatcaagtctatctcttttccttttggcaagactattcttatacctttcccagtagatgttaatctatcctgtttttaaatgaaacttctagtacagaagacacatggtcccttaggaactcattgtgaaattagagggttttcagagaaggactctgttgtttattttgattgttcatcttctccatagggatgatcaactttatataaacagcgctgcatccatgtaaagtcattttacatggcacttgagcagattgacagatatttagagaacatgaccgccttagggaacaattagttcagtcccttaattgtgactggttggtcttctctcttccagattgagattataagtttcttttattataaattcatgttgtgttgttgacttatattcactttagaccttcatattttttgcctactctttgcattgctagtattcccctgctctgtgttaaaatatgctggttctgtcagttaatatccaaaatatgtgatttttttaaaaaataaaaagtgtgacagggtctatgatgtataggacataggattagcatggatatgactcagtatcctgggctccaaccatgattctgtcacagctactggtatgactttgggcgggtaatttactgagctcagaggcctctgagcctcagtttatcactatcagatgtgtggccagattcagagcagctttttccaatgggttttccatgggatgttaacagatataacatgaaaaatggtcccatttaaaaataggtggtggtggttgggaggggatggggaggcaaagattaaatgaacctaaatagatttctttgctgaagcatgtgagtctttcacatattttggcttaaaaaaaaaagaattgtaaatcttcagatctttaagaggcgtttcctgaaagtatacaactatagttcctttttttttctctttttaatgctttagtgccgctaacccttgaccaggctcatctgcaaagcagaagtagccactttccttggtgcccatcccagaaatacagtaaaacacccaggaggtcactcagggctcttgactgtggatgagtttatgcattccacgtgtacctttctgcatcatgaactctttgagggcaggagcctttccttatttgccttgtgtaaagagggtctattcctgtgcttatacctggaagatgtgtagaatgagtcaaactgtccataagtggaaggcactgccttgaaagttttcagcttccctatcacagaaaatgttattatagagtgaatttttgaaatgagtggaaactgtagtcaagatgatatctatgatcaggaatctgtgagtttctaaggttataaagataacataagaataaaattactcatagataaccacaggtaggttaaaaaagggcagagtacagctttgcaggtggttcttactggcttctttctttggtctcgataaatttgcctattaccttgattctgtctgataatgtgaaattattaattggagaagtttgtccagattaccaatatatgaggaatggacaaaatgccacgacattttcttcatcgttcaccttgtacaatgccactgtgtacatacaaattcaattcattaaatttatgatgagtttgtttttctactttgctgttccattacctgttgtatttcttataagcttctggaaagcataaaatatgtcttatatacatttatttctccattgatacctagtgttttataattataggaagaactcaataaatgttgaaaaataaaaagatgactatagtggctcagacattttttccaatttagcatctgaagatagagatagtaaatatgatgagcttatatgtagcagaaattaatgttttgaaagtaggggaaaaaaccctatcatttcactaccaaagaatagccattgttaagacttcaggttatttctctctagacatatttcctgcaaagataatttttatgtatagttgtaatcatattgtatatataattttgtgtcctgatttttttcatttgaaactatgttatagaaagtgtttatgatagttatatttgctcttttgtatataggaaatatttttacaataaaatttttaaaatcatagaagtcttaagtaatatagttttcactaacagaatttttaattgtttctgcatggtttccttaaacatttattattttattattatgtttcttatgaggttttgccttcattatttatttatttatatgcaagagctggagtagacatttttaaacaggaatatttttatatttttccttttgaatattttcaaagcatcaaacacttattggcaaactgcttttcaaaagtatgtgtcaatatttgctatatcaaacaatgtatgaacattccaaattcattgcaagttcaccagcaaagaacattttttttactttttaaaatattgactgattttaatgggaaaatgctttattattttgtttaatttctgagggtattttttggtcttattactgaggtcaaatcttttctcatacttgtcatttttgttcttttgtgaatggtccatttatgtctttctatttatttttcttattgaattgtatgaatgcttcattccataaaacatgctatttcctgcagggactgtatattcacacaccactgcattgctgatgcccaaggatagtgtatgaaacagggtaaaatcaccatcggcaggcagctggagtagcttgttctgtggactgttttgcaatgcaataatgaggagggagctgagttactaaacagtcccctctttctgttagttcattattgcaaaagcaaggcctggcgagtgaggtgtgtgtggcaggcttcattcttccctttgtctcaactattattagataggtccagaaattgctggtacgttggggctgtgggcacatttggtttatgttgctttcctagatgttaagtgtcgcaacagctcgctatggtttgctcctcacttgagcaaattgataacagcttgtctgtgactccttaagaataatgagaatcaacctcattttaggagaggggacagattgtgtctgtacttggcatccttctgcagacatccttctgcagctgggattgcttgagacacttcacagagttgaggactcatattgacagagaaatgtccattttgtctgaggagctgctgaatctgtcagcatctactggcagaagtgctttctctagcatgacttcacctctcaaatccctggatgtaacaaaagtcaatataagatctctgcagtctatttcagtcctttgtcattttatcagataactaaatgctaaatgccttcagatacatcataagctaagggctcctttgaaaacaggacagacactttacaaactacatcaaagcatgcagatagttttatttttaatactttttttgtcttgcatgaaatacttgaaaatagttcagatatcgccgctgccacaaaaattgtcctatagcaaagaaaataatagctcttttaccttaatagcgaaagttttgtgtagaaatgatttgaggatagaagaggtttttccaaatatgattttgttgtgttttcttttttctctttctctctttcttttcttttctttctttctttctttctttctttctttctctttctttctttcattcattctttctttctttctttttctttctttgactctataataacttcttattacatgcagaagtaaatcttaattctttttggccatcttttctgtgtgaattttattttattttaaaaatagctttattgagatatccttgacatatacaaattgtatatatttaaagtgtacaacttgatgttttattctatgtatttattatgaaatgattacattccagctaattaacatatctatcacttctacatagttaccatgtgggtgcatgtgtgtatgtgtgtgtagatatacgtatgtgaaattcaacatgaattttggattctataatattgttaaacactttagaaataaactttcttgtctctacctcagtatgtttgcacatacattcttcccaagaagcaaacccattcttgtttgtcagtggaggctttacttctttcgacatttgcctcctcaattttcttcttcagttctgtctcctccacatgatgtcagctcacatattcaaaatatgttgccttacaaatcctcttgggtatgtctatgtattatttccttaaggtaggactaattttacattctttatgttttccagtgtgttgactagaaattttttttatgcaatgtgtttctaataaatgcagttgtttgattctctttcgttctaaaacattcatgagattcaaattgtgatcatatttccaggtaattgaaggacacatgagtttagggttattgatttcatattttaaacaaaatcacaaattaaggatttataaaataaaatagattgtgattatattttttgtttgtcccttaatctttaaataaataagtggtttcacaaaattttcttttaaagatattttaaaacctctgatgaggccatgcttaaaaataattaaacccattataaagtagtggtactgatggtgatgtttgaagtaatatctttgagtttggggattatgtgattttggaactctgcatgtagaccaacttctggcaacagtttggaatagagaggacaactttggccacctggagcaacagcaaaatctgatggtgataactctcaagagagtccatataaggcttagtaaagatacatggaggaattgtatgcatctgatttttatttgtaaaattaaattctgagattccaaatgcaatactgaaattgtgagctctttctttgacaacaaatgtgtccagggagatgatgagcttgttaaacatcaaggttataattcaaatgacaccatcaagttgaagaaatgtaaaaagatatacagacacaatgtttgaggaatcatttgccagtgttacattggaaaatatgttgcatagtgttttcttaagcttattcctttgttgttgttgttgttgttgttgtggagatagagtctcactatgtttcccaggctggtctcaaactcctggagctaagtgatcttcccaccttggattaaaggtgtgagccactgcacctggccatacttacttttgagtagttggtgataatgatgatgttgatagagagtaattaagtatgaatgagttatttacttcttataacaatatactatgttatacttatgtccatttataaatgggaaaattgaggctcatagagaagatgtgagttgccctaggttatatagctagtaagctgcagttaggatttgaacccacttctcactgagtccaaagaccaatattttgagatactgaaaagttttttaggatataataaatgagtcatgaatagttactgtgacatataaaagagggattccttgtgtattctgagaagttccaatgagttagtagtgttggtcaagtcgcctcttggtataatgttaacatttctggttaaaccctgaactctgcagccatcaagaaattatagcccaagaacaaagggatcataggtagtctcccacatagtgatgtctgtcctttgacaaacatcagtgtcttcactttgacaatggtacgttttcttttgcttatcatccctggttaaatctttttctaatctcagctgaatgggttgaacaatgatagtcattttcatcccttgatatgaagagatggttactaaactcaaagcaagaaaaagtgtaaatatgacacttctgagccggggaagcaaagtgtaaactgaggcagcagtattcttctttatgaagtatttaagccatgatgctatttttcagtgtatttgctatgagaatgagagtacttgctaatgaacactctcattgtatattaatagctgtattaattgagcatttattatatgccaggtacagcacttagggctaactgcatgctttctcatttaatttttacaatgaccttatgatgtatataccattaatattctcatgtcatagattagcaacctgaggcacagaaagggtaaatcactttctaagattacacattttattactggcttaatcagatgatgtctaagtatcatgatgacatagtctgcgctattaacaactctctcctgctttttgcactttaagcattctacatgatttttacacacgattttgctcatggtttacctagatgattttgaaactcaatcaagttatggctacaggattatatgaagggacaccataaaaaccctgtctattaattgctgttggctttgctttagcagaagacacattggattgggcatcagggcaaatggattctggcaaaagatatgctcttggaaccacttctttcagctattaagtggaatgaataatgcttcacttgcttaaaggcaggggctggacaagatagcatctttgactgaatatgaacagaacaacgtatttctaattgtgttctttaggggccagggttgctggcataagcatgaattgagcatcttaaaaggtgtcatgaaaccatgaaggaaagaaatctcttgcctcttggtataatgtgaacatctctgattgaaccctggactctgcagccaacaagggactacagcccaagaacaaagggatcataagtagtctcccacatagcaatgcctctcctttgagaaacatcagtgtcttcactttgacagtgctacattatcttttggttatcatccctagctaaaaataattttagaagggcatagaaagaagaggtatatctaagatactctcttctaagtaccaaggttgattgatgattcttttcagaaacaagaaactttcttaaagtataatatgttgatggctttgttgagttagcaatttatcacaccacatagttctgtgggtaatttatcattgaatcaggttccctttactctgtcccaatattataggttaatctgggacatgtagtttctgaaataccgacagtcccattttgaattattattttagaagctgtgaagacatttagctccttttgatttcatactcttgactttagtactcattgtagacatgagaagtatgtggcattgtgtgagcatctgtaaagattgtaaatgatattaattaagttggctgtgctttttctcctcacaatggattcttttgttaggctggtaataatcgcgtttttggtaaaaacacctcatggaatttttttcctttctcataaaatagctgtttactgtaaaattgagatagcctctcaagtctggaacacctttcaattcatcaaaaagggacaacctaatattccaaagaagactcaatccttttaacacacatacattttagggccagtcaagagaagtggcctgttctgtaggaaaacatttcttggcacattattattttaagtgattgcaggagaccacagagggagagaaaagagacaacaacaacttctagcatgcctgggggatgacttgctctttcatatttgtggaaccctatgtcaagagagaaaacatctaaaaataaaaacgcatttactcagattctctagggcaaggtgcaaagagcctgtgctgtaggagctcagatcaaaaattaaatggttgaaacctgcagagcaactgccgtcagcagaaccgtgggctccttctggttgattttgtgccattcagttagtttccataaattggccttgggtactgatgttctttggtcttttttgtgctgtccataactaatagtgaccgttgctggtaaattgtttcttcagtccagtgattattggcctttcaaagcattgacttcctccaccaatgtatacagtcaccaaatgggatctggtttgttcaacattctagtcaagttccaagtggtaggaatcaaaattccactctagtttatgtgtattattcctatagctcttccctcgagatgtggcatgggatggaaaatggagcctatgtgtggtataggcactacttaaaatttatcaatagagagggatccatgaggaggaggaaacaagccaaagagattgggcaggctaattttcttctagacagttcctgctctcttggattttactccaattccccactctttccataggagtaaaagtcttaaaacttgaactaatgttgaattttaatcctgaatggtgtagcatccttcatttctatccgtctcattatcagcccatacccctgccattgccactaccatattttcaaatgtctttcaactctccaaaacctactgaccctagtttatcatgcatttgaaaggctccccactttttgtagaacttcaggtattttaaaacatatttagaaagactctaaataaactggagtgagtctatagctaatgtttgaccaaaaaaaaaaaaaaaagtaaaaaagtgtgctgtgaaattttgaatattaattgtgccaattggaatggcatttttaaaaagaaactatttcatccataaatgataaatatatatttctttgtttaaaaagtacattaatgcaaaattctccacccccatgtatttttagcttacatatccatctaacctaaatacagtcatgcatcacttaatgagaggcatacaatctgagaaatatatcattaggcaattttgtcattgtgcaaacattgtagagtgtacttagatacacctgggtggtatagcttagtatacacctaggttatatggtatattctattgctcctagactacaaacctgtacagcttgctactgcactgaacactgtgggcaattgtaacacaatggcaagcatttttgtatctaagcatatgtaaacacagaaaaagcacagtaaaaatacaaaataaaagaggaaaaaaagtgacctctgtataggacacttaccatgaatgaagcttgcaggagtagaagctgctctgagtgagtgagtggtgaatgaatataaaggcccagaacattactatacactactatagactttataaacactgtacacttaacggtacactaaatttacaaaaatatcttttttaccattcggcccagcaatcctattactgagtatatacccaaaggaatataaatcattctattatatcataaagacacaggtagtcatatgttcattgtagcactattcataatagcaaagatatggaatcaacctaaatgcccatcgataatagtagattggataaataaaaagtggtacatatacaccatggaatactatgcagccatacaaaagaatgagatcatgtcctttgcgggaatatagatggagctggaagccattatccttaacaaactaatgcagaaacggaaaaccaaatactgcatgttctcacttacaagtgggagctaaatgatgagaacacatggactcatagaggagaacaacaaacactggggccgactagaagatggacagtgggaagggggagaggatcaggaaaataaccagcaggtaccaggcttaatgcctggtgatgaaataatctgtacaccaaacccccatgacatgagtctacttatataacaaacctgcacatgtacccctaaacttaaaagttaagaaaatttctttcttcaataaaaaattaatagctaatttttatctttaacaattttgactcctgtaataacactacttaaaacgtaaagcaccatatagctgtacaaaaatatttcctttctctttcctttctctgtatccttattatataagcttcttattaaaaaatgtctagttatctcttttattttttgaacttttttcttaacaactaagatacaaatacacatattagtctaggcctacatagagtcagtatcaacaatatcactgtctttcaccttcataccctgtcttactgaagattttcaggggcaataacatgcaaggagctgccatcgtctctgatgaccatgccttcttatggaatacctcttgatatgcctacctgaggctgttttacagttaactatttttttaataagtagaaggaccacactctaaagtaatgataaaaagtatagtaaacacataaattagtaaccattatttgttattgttatcatgtattatgtagtacacataattgtgtgtgctctaatttatatgaatgacagcacagtaggttttttatgccaacattgctacaaacatataagtactgctttccattatgacattactatgcctatggtatattaataactaggctataggaatttttcagcttcgttataatctaatgggaccactgtagtatgtggtccattgttgacctaaatgtcattatatggcacatgattatacttgaaaataatcaaagttatcagatagagaaggcttagggatgcagaaccatctttacaagtttttgctgctttgagacaaatccaaccccgactattaccagcttagagacacctcctagctgcctctagagatgtatatcatctttgatcagggactggggacctaaaacaggaacaatagcatagcatgcttttatgtgcaatgaattttcaaatattaaaaaaaaccttcaatattgttgttatattatctgcacagtattaggaaaaatgagtaataacttataagtgaaaaaatacctatgctgcaaaaaactcttttaatgttgactccagtttcagcagaataaatttgtctgatgatagccccagtgtctacagaaaatatacattttctattactggggttacagtgtatgtagaagcactgtgagaaaccttgacattttggcagaaaaggatttttaacaataaaattcaagaaaaggtcatattagtagaaattttggtagtcattttaaatgtctcccacattatatggcatcataaatgcatttaatatcagattgaattatggctgtaatctttagccttagtagtctgaacatcatttcatacctagcttaatatcctggaatgttatgtgtggtttctgctttatttaaaatagaggagtgacaagggtgatgaatacattttatttctgttttctcatcccattttctattgcaaatgaattttttttcagaagtaggtatgcctacctgtatctttgcaaaatgcattttcagaaaataggtttggaatattcatttaaatcctatttcttgtgacccaatgtaaactcactgctgttaaatctaaagtgtgtgagttcttacagctgagcagtaattctactgacattttaatgtcatgtcctctccttagcagcctgtttgcatattgcatgcaggctacatgttaggattttttaaaacatgaggtgtcttggaaaatgattttgacacaacttgtcctcttggaccaactgtattttataaacattttaatgctttactcttgaatgatccatttcactaagagtcagaaaactgagtttctgtcatgccatggtgacatgatgctgacattgctgagctagttacttattccttttacctaaatgtttaatagaacacacccagccctgtgtgggcatgagagggaaatgggcccagaagttgcagtggttgcattcacaagccattaagctgtggtcagtttctccctaaagcattgtacctcccttagacaacttcctctttggggagttgcaatatctagaaacttcagaggaaggggtccagctgcagggatatggttaaaagttttttcagaggagccactttgcatggcagtgggccatttcctgctatcactcaggcccagcctacccacaagttacagtctttggcaagaaacagaaggaaacagtggtggctcttggagccacatgctcaatttttgatggtgctctttgcgcagtgaatgccagctgctcctcaatcaggtatgctgctgttgttctgagagtgattaggaacaaaagggatgatgcagatgtgtcaggctatgggaagtgcaaatgtatatttttggagcactgaatgtaaagagatttagaagtttcctgttggaaagcaggctatcgaagcaggcaggcaaaatgattttgacaccaataccaaccaagggcaagaagtggaagcttggaaatatacttgtttgggaataagaaattgataagacaaatatactttttaaaaagaaagataagagaggtcatgaaagaattgtgaaggtccagtctgtcctatttcctttgctaccacctgagtctgttaccatggtctcactcttgcatgaaagcagtcatctcctacctaagccccttctgttcatcttgctccttggaggctggcctccacatccttgaaaatacaagtctgattttgcctctcctctgcccaaacctgccaacagcttcccaactcatgaggagtgagatcaaatgtcttgccatggctgacatggcattcttgggcctggccctgaccttctctgtccttatcttgcaccactcttactgtcactcgctcccttcaggtccctctgtttccttgctgctcttttatatgccatccctcctcagggcctttccaccttcatttctgattagaatattcttcccccagatatccgtattacacactttctcactccattatcatctgttcaaatagcacttaaaaagagaggttctgtggccatgctatctaaaatagcacactcacatgcacccatgactttctctccacttaccctatcttcttcacagcacgtagcaccacctgtcatattctatcaagttgaaccatatgaaattgcttttgggtggatcaagaacagctgaatattggccatttcatttggttcaaactaaaatatatttattaatttgtttattatttgtatttcttctatactatgattgaaaccctgtgggtcaaaggttttgttttgtttttggcaacatctccaatgtctagagcacagcaggaacttagacaagttgtattgaattaatggaaaggaagaagaaaagccatataacttgttgacagtaagcagtgaacacttatatgaaaaatgatctctctccctttctctgtctctgtcttgtgtgtgtgtgtgagagagagggagaggagagagaggaagcactagaggactctagaaaaaggtgatgggatgggcttcagagggaatccagaaaattaaaggatttatttggatccatgtaaagttcagtgtaatgtttctagttgtagctaggggctatgtatgcacctataattattatatatttttttccatgtggttttctgaaactgggaccaagtgggatcaaacaagctttggataatataattgtgaactgaaaaagtttcataattggtaaattacaaggattcagcttgccaattgtgctgtaagttgatttttactagagaaaataagttactttttactaacagttctagaaacatggctaataatcttactatcatccctgctacggatgcttagaaatactgcatgtctaatcttgaaaggaaataaaatcattactatgggtcagaagtaaaggttgaattgaaaactccagggataaacacttgaattgatactgtggctgcctttgggacagtattattagtctcactaacaaagggcttgagatatgaaatggaaaattgaggttctgtgggttggaacagagatcttcagtacaaagttgtgaccttggaatggaaaggactgaaaaaaaatcatcagaacagaagagacaaggaagctgtgtcttagaaaaagaatgtctccttcaaaaacacatctctatggatttgtacctcatttaggtttgggaattgaatttgtactacttgtgtagtatggaaaaatcacaacttgaaaaattaactacagagagcccagattactgatacttctaaagcacctggcagaatctgttacaaacttcttaggagaaagataccattcaaccaagtttcacaagattcctaaacataaatatcttctaaagattaactcacaacctcaaactataaaacataagaacaaaatcccccacaagtgagagttagcaaacacaaagagcaggattagaataagacctaaaagtgatggaactatcacatagactatgaaaaatgaatattgaaaatgatagagacataaatgaattataaatataagaaaaaataaggttaaaaaaagaacacactttataaaggtgaaaactaaagtaattgaaattaataatttatcataggttaaacaaattagatatagctggagagaaaattagtagactgtaatataatttgaagaaatcaaccagaaggcactgaaaagaaaatgatagaagatatgaaaaagaagttaagagacatgttggagagcataagattcaatatatgtttcataggccttctagaaggagagcacaggaagatttgggaagaggcagtatctgactataatgcaattaaattaataatttaaattaaaagacaacaaaaagaatcccacatggatttgaaattaaatcaacacacgtctaaacaactcatgagtcaagcaaaaaaataatgaaaattagaaaatatttaaaactgaatgttaatattaattaaattcatccattaaatattgtatgagaagcaatgaaagttatagttagaaagttatagctttaaatgcctatataagaaaatgaaaaaaggtacaaattaaaaaaaattaacttttaatttttttggctacatagtagatgtatatatttatggggtacatgagatattttgtacaggcatggggtacaggcatgcaatgtatcataatcacatggggtgtaaatggggtgtctgtcacctcaagcatttattttttgtgttacaaacaatccaattatactcttttagttatttaaaactgtacaattgaattatttttgactatagtcaccctgttgggctagcaaaccttaggtcttattcattctttctattttttttgtactcattaaccatccccacttccctccctcctccactacccttacaagcctatggtaaccatccctttaccatctatctccatgagttcaattgttttaatttttagctcccacaaataagtgaaaacatgcaaagtttgtctttctgtgtctggcttatttaacttaacacaatgacctctagttccatccacactgttgtaaataacagaatctcattctttttaatggtttaataatactccattttgtatatgtaacccgttttctttatccattaatctgctaatggattgctaccaattcctggctattgtgactagtgctacaataaacacgggagtgtagatatctctttgatatactgatttcctttcttttgggtatatacctaggagtgggattgctgggtcatatggtagtgctatttttaattttttgaggaacctccaaactgttctccacagtggttgtactaatttacattcccaccaacagcatacaagggttccattttcttcacatcctcgccagcatttgttgttgcctgtcttttggataaaagccattttaatgagagtgagatgatatctcattgtagttttgatatgcatttctcaatgatgttgagcaccttttcatatatctgttttccatttgtatgtcttcttttgagaattttttactcaactctttcacccatttttaaattagattattagatttaatagtgttgtttgtgctccttatatgttctggttattaatcccttatcagatggatagtttgcaaatattttctcccattctgtgggttttctctttgctttgttgactgtttcctttactgtgcagaagctttttaacttgatgtgatctcatttgtccacttctgttttggttgcctgtgcttgtggagcattactcaagaaatttttgcccagtccagtgtcctggagagtttccccaatgttttctttcagtagtttcatagtttgaggtcttagatttaagtctttcatccattttggttttgtatatggtgagagatagggattgggtttcactcttttgcatatggatatccagtttttccagcaccatttatagaagaaatcatcctttccctaatgtatgttcttggcattgttgttgaaaatgagttccctgtagatgtacggatttatttctaggttctgtattctattccactggtctatgtgtctgcctttatgccaataccatgctgtttttgttactatagctctatagtataatttggaagtcaggtaatgtgattcctccagttttgttccttttgattaggatagatttggctattctgggcattttgtgattccatataaattttaggattttttttctatttctgtaaagaatgtcatcagtattttgatagggagtgcattgaatctgtagattgctttggatagtatggacattttaacaatattcattcttccagtccatgaacatgggatatcgttccatctttttgtgtcctcttcaatttcttgcaccagtgttttatagttttcattgtagaaatctttcacttttttggttaatttctaggtattttatttaatttgtagctatcataaatggtactactttcttgatttctttttcagattgttcactcttggcatttagaaatgctactaatttttctatattgattttgtatcctgtaaatttactgaatttgcttaccagttctaatatttttttgagagagtctttaggtttttccaaatatgagatcatatcatctgcaaacaagggtaatttgactccttcctttctaattcggataccctgtgtttttttctcttgtcttactgatctagctaggactttcagtaccatgctgagtaacagtggtaaaaatgggcttccttatcatgttcctgatcttagagaaaaggctttcagtgtttcttcctttagtgtgatactaggtatatgtcttttgtatatggctttattgtgttgaggtatgttccttctatacataggtttttgaggatttttaccataaagggatgtgaaattttatcaaatgctttttcagcatcaattgaaatggtttttgttcttcattctgttgatatgatctatcacattgattgagttgcacatgttgaactatccttgcttccctgggataaaccccacttggtcatgaggaattatatttttaatgtgttgttgaatttggtttgttagtattttgttgaggatttttgtatcaatattcatcagtgatattggcctgcagttttcttttcttgatgtgtctttgtctggttttggtatcagggtaatactggcatcgtagaatgagtttggaagtatttcctcctctatttttcaaaatagtaacattgttattagttcttctttaaatgcctggtagaattcagcagtgaagccatcaggtacacagcctttctttactgcgagatttctttattatagttttgatcttgttgcttattattggtctgttcagggtttggatttgttcctggttcagccattgtaggttgtatgtgtctaggaatttgttcatttattccagattttttaatttactgggatttagttgctcatagtagccactaacgatcctttgaatttctacagtctcagttgtaatgtctcccttttcatctctattttatttatttgtgtcttctctcttttttcttaatctggctaaaggttaatctattttgtcttttcaagaagcaaactttttaatggatcttttgtattttccttgtttcaatttcatttatttctgctctgaactttattattttttcttctactagttttgggtttggtttgctcttgctttcctttcctagttctttaagacacactattgggtttttttatttgaagttttaattcttttttgatgtgggcacttaaaactataagtttcccttttagtactgcttttgctgtatcccataggttttggtatgttgtgtttccattatcatttgtttcaagaaattttataatttccctcttaatttcttcatgacccgttggtcattcaggagcatattgtttaatttctatgtgtctgtttagtttccaaaattcctcttgttttaatttctagttttcttccattgtggttggaggagatagttgatattatttcaaattttttgaatgttttaaaacttgttttgtgacctaacatgtggtctgtccttgagaatgatccatgtgctgaggaaaagaatgtgtattctgtgtattctgcagccattggatgaaatgtcctgtaaatatctatcgggatcatttggtctatagtgcatattaagtctgatgtttctttgttgattttctatatgggagatctgtcctatgacgaaagtgggctgttgaactctccagctgttattttcctgaggtctgtttctttatctctaataatatttgctttttatatctgggtgctccaatattggttacacctatttataattgttataccctcttcctgaattgaaccttttatcattatataatgaccttctttttcttttcttacagtttttgtgttgaagtctattttgtctaagtatagctactcctgctctttttgtttccattggcatggaatatctttttccacccttttagtttcagtctgtgtgtgtttataggtgaagtgtgtttattataggcaatgtatgtttgaaggatattagcaccagatatactattctagggtaaaagttttttctttatgccctgtaaatgtgtcatgtcactctctcctggtctttaaggtttcactgaaaagtctgctgacagacatattggagctccattgtgttatgtgtttcttttctcttgctgcttttaggattatttctttctccatagcttttgggagtttgattattaaacacctgcattagtcttcttcgggttaaatctgcttggtgttctataattttcttatacttggatattgatactcttttctaggtttgggaagttctttgttatgatccctttgaataaactttctacctcctcttcatggccaataactctaagatctgcccttttgaggctattttctagatcttgtaggcatgctttattcttttttattttgtcttctctgcctgtgtatttgcaaatagcctgtcttctagctcactaattttttcttctgctggatcaattctgctattaagagactccagctgggcacagcactttgggaggccaaggcggacagatcacctgagttcaggagtttgagaccagcctggccaacatggtgaaaccacgtctctactaaaaatacaaaaattagccaagtgtggtggcgtgtgcctgtaatcccagctacttgggaggctgaggcaggagaattgcttgaaccctggaggcagaggtggcagtgagctgagatcacaccactaccctccagcctgggtgacagagtaagactgcatctgaaaaaaaaaaaaaaaaaaaagagagagagagagagagactctgatgtattcttcagtatatcaattgcatttttcaactccagaatttctatttgattcttgttaattatttcaatctttttgtgaaatttatctgatattattctaaattccttctttgtattatcttgaatttctttgggttgactcaaaacagttattttgaattctctgtctgaaaggtcacatatatctgtttcccaggtttggtttctcatgccttaattagattgtttggtgaggtcatgttttgctggatggtcttaatgctcgttgatgtttgtcagtgtctggacattgaagagttaggtattgtcatcttcacagtctgggattcttcatacccattcttcttgggaagactttccaggtattcaaaagtacttgggtattatgatctaagccatatctgcatcgggggtaccacaaacctagtaatgctgtggttcttgcagaatcatagaggtactgccttggtattcttgcataagatccagaagaatcatctggattaccagggagagattattgttctcttccgttactttctcccaaacacagaatctctctctatgttgagctaaccacctagggctaggggtggggtgacagaagcgtgcctgttgcactgagactgcgttgggtcagacttgaagccagcatagcactgggtcttgtccaaggcctgctgtaaccactatctggcaaggccctagatacctggccgtacttaaggtactgttcacttaaggcccaaggactcttcagtcagcttgtggtgaatgcagccaagtctgagactcatcccttctggctcagggcaggtccagaaatgccattcaagagtcaagccttggaactggggaccccaagagtctgcttgttgccctaacccaccatagctgagctggtacctgatttttggttcttctgaaggtgtgatttttgcctagatagttgttacatttggtgttcctgtggggtggggggacaatcagtggggccttctattccaccatcttgctcccaaaggagtaaatattattaataataagatcagcatccaattcaagaacttagagagtaggcaaagcaaatataaagtataataaaagaaaaatgtgtgtattaataatatataaaacaaaactgaaagccctgaaaagactaataaataggttaacatggcatgtttgagtaaggaaaccactggaaacattacagctactagtatattggaaataatccctgtacatctggaacaagagaagaatgacttcgggttctgcttatgtttaattggttgttctagccagcattgtaggtaaaagaaataaataaaaggtagatagaaaagagagaaacctaattgttattagtaaagagacttcattgaaaaactattagaaaataatacaaaagttcaggaaaattgctagatataaagtaaaccacctttgtgtaacccagcaaaagacaattagaaaattctgtaaactacctttgtgtaacccagcaaaagacaattagaaaattcagtttaaaagcagataccatgaatacagcaaaaattagaaacatgtagtaataaatctaacaaaggatttttagaaatctttacaaataaaattacaaaattttaaggtaagacacaaagaagatgataaatagaaagatatactatacttaaagcagaatgactcagtatcagaaagatttcaattctttctgtattcatttataaattctaataagagctcacacaagagtggttttgttggttgttttcaggaacttgacaatctgatcaatctgattccaaaatgtatacaaagagctaagcgtcagtcataaccaacacaattttgaagaagtcgggaagattagccctaccacatgtcaacagctactgtaaaagtatagtgattaagacattgggatattggagcagcaataaataaatatactaggtttagaaatagactcatgtgtccctaaggatgtattacaaatcagtgtggtaaggatacaataaatgatgctaggagatataattattcacatggggaaataaaataataagtaccctttcttacaacatataataattaaatcccatgtggaatgtaggtgtaaaggtgaaaagaatagtaaagattttatgttttttagaagaaaatgtatgaaatatctttgtggccagtgggcagggaaggatttcttaagactaaaacccatttacgcctagtgttccattattggaatgctaagcatgtgagagttatttattatcctactgctcaagatcatcgccaaggcctgattgcaaaaattcaaaaaaattgcaacctcaggcataagtgggttaaaagacaaactataaagaaaaataataataggttgaatatattaaaacaaacatttttgaatagcaaataacaccaacaacatttttaaaaaacttcagaataggagatatttatagtatatacaaccaacaaaaattaatatgcattttgtatgaaggaatctttcaaataaatatttaaaaattcaatccaatggaaaaataggtgaaagatatgaacaaacaatcgacagaaaaaaatggctgataaacacacaaatatttgctttagctcactagtaatcaagtaaatgcaaattaaaaaaaggaaaattttatttcataccaaccagttttaagaattaaagtgtgaaagtgccaaataagaataaattggtaaaaccaattggaaaagtcagtttgactttacttagtaaagttaaacatttgcatatcttgaaggaggaattccacttctaggcatatatctagaaacatgattggatgtgtttgccaggggacatgcacaaggatgtttattctagcattattttgaaatagcatgatactcaaaaataaaattctgtatttctatcaacagaagaaagtacaaataaaaactgggatatttgtgcaatggacttacagcatagtagatgaaatgtataaattccatgagatacattaacatgggtaatgttaataaatttaataaacaacataatagcaacataaatttaagcaaaaacaaaaacaacttgcagagggattaatattatttgatgccatttctaggaagttttaggacattcaaaacaatattttatgtttttaaagaatacatccataggcagtaaaataattaaaagagggtggaaatcctaaacaccaattgtaggatttttctgtgaagggaggtagggaaggaggtaaatgggctcagagagggaaggatacactgggctttcaaatctaacggaattgtttgtttttttccccaacattttatttgataataattaaagattcataggaagttgcaaaaattgtacagatatgtcctgtgtaccattcacccagtttcccccaatgattatgccttgcattactatagttattatagtcatgaatttgacattgatctcatgtgtttgtgtagctctatgtcattttgttacatgtgtagatttgtgtaatcaccacttcaatcaagattcagaacagccccaatcactacaatgatctcccttgtgctatgcttttatagtcacagccacactcctttgccaccatatctaatccctggtaaccacctaatatgttcttcatctctataaaatattgtctttttgagactgttatataaattaaaccatatagtgtgactttttgaaattggctctttttctacacagcataatgtctttgatccttgagatcctccaagctgttgtatgaatctgtaatccattcctttttattgctgagtagtattccatgatatggatgtaacagtttttaaactattcacctattgtgggacattttagtcttttcaatttttggctactacaaacaactgcatataagttttgctgcgatcataattctttttctctgggataaatgcttcagagtgaattatggggtcatatggtaaatgcatatttagtttttaaagaaaattaaagctattttccagagttttcaaactattttccagagttgctgtaccattttatggtacagccatatgttgttgttcccttaatgacatgtgagagatccagttctctccatctttgtaagcatttggtattgtcactgtattttattttagcagttcaaagaggtgtgtagtgatgtcttatcatagtcttaatttgcatttctctgatggataatgtactagttttctattgatgctgtaacaaataactgtaaacttagtggcttaaaacaacataaacttacgattttacagttctgtaggtcagaagtctaacacagttttcaccagactgaaatcaaagtgttggtattcctttctgcaggttgtaagggagaatttgtttcctcatcttgtctaactcctaggctctactcatattcctcggctcatggctccccttcctctgtcttcaaatccagcatttgtgggttcagtcctcatatcatatcattcttacctcttctgcctgggtcttccacttttcagaacccctgtgattaaagtagccccaaccaaataatctgaaataatggctgtattttaaggtcagctaattggcaatcttaattccatctgcaaccacagccccctttgccatgccagaataactggttctgaggattgggtgtagacatttttagggagccattgttctgcctatcataggtagatatgttgaacatcttttcatgtgcttatttgccatccatatgtcttcttcagtaaaatgtctatgtctttttgccattttcaaattggattgtttgttttattagtattgagttttgagggtttaaattttttttgttgtagatataagtcctctataatatttgttttacaaatattttctttcagtctatagcttgtcttttcaatcccttagcaggggccattcacaaaacaaaagtttttaattttgatgaagtccaattcattgatttttaaaagtaaattatgcttttgttgtcattctgtataagaactcatcaccaagcactaagtcctaacatttttctcctgtcttctagaagttttatagttttatatttaattctaccacccatttcgagtaatttttgtataaatagtgaggtgcaagttgagatttattttatctatttaatttgtctgtgaatgtctgtatgcattgctccagcaccacttgctgaaaagactatcctttctctacagaactgcttttccactgatgttaaaaataaattggctgtatttgtgtggggatgaattgtttcattccttaatgaaaagaggaaatacaataaactattaaagtctaataaggctaagggcatagtcatgtgttgttttttatatttttctgttatattgaaatattttaaaatcaataacgtaataaggaggcatttgcaccctcaaactctgaaaatattaagaaagtgggtaatgctatagtgagatgttgatcacagtggattggagactaatagctgtatgatattgataaggttactggcctctctgggcttcagttttattttttttttgtgaactgagagggctgaactaggagacccctggagtcttttgacatttgcatgctcacatagtatgtgatgcttctcattgttgagtttagagtaagagatgtggagcgggatctaggctgtcattctggtttacagcctaaagatgagacactgtttatatttccaggtagaggctgcctaattaactacaggttcatagtggttgggagcaagccctctttttcaaactacttcgggaggttttattatacctgtaataatcattatactatagaagatatcattgtagtttcttataaatacctcacacacttcttctggatttcataatggggtcactatatgatgcttcttgggatctgatttacaatttataaataagtctgaaatataaataagaaaatacaatgtataagagtcctagaggtttagtcagcagaattccaaataggagtttaaccctctaaggagcacttacagtcttcttagaaataaacacattgtaaaatgattatgagaaaatatttatcatacacattttaattgataatttagctgttatattttaattagaaaagagtttctgattttctttatggctatgactttaagcctgttatctagaacacagtttatattttctggtttcatcatgacagaaggcattttgagaagggctagagcaagaaattagcaacaggacgtcaatttcgtcttctttgtttacttcttctggctagtagcagaatttttttctatcagtaattttggcatcaataaaataataaaggattacaaacttcatccatcatatgccaacaaatttgataacttacatgaaatgtacaaatttctggaaagatagaaactaccaaaaatgacccaataagaagtagaaattccaaatagacctacaacaagtaaacagattgaattactaattttaaaatttcccacaaagaaagtcccaggcccaaatggctttactcgtgcattctaacaaaaatttaaataagaatgaccacaaatccttcacaagttccttccagaaagagagaaattggaattttcattcattgttggtggtaatataaaatagcgcagtctctttggaaagctatttggcagtttctgaaaacattaattctagagctgcatatgacccagcagtttttgtactccctagtatatatccaagagaaataccatatatctacaagaaaacttttacccaaatgatcatagtagcattatttataatagcagaaaatagaaacaacccaaatgcctatcaacaagtgaggtgacaatcaaaatgtgatatatccatacggtgaggtattattgagaaataaaaagaaataaagtattgatatatgctacaacatggatgaaccttgaaaatattatgcttagtaaaggaagcaagtcacaaaagactacttcttgtatgactcaatttatatgaagtgtccagaatagacaaatctatgaaagttgattagtgtcttccgacagctgggaggtttgggacaagagggagtgattgttaatggacctgttgttttaaatgttattgatttgattgtgttgatggttgcataactttgaatattgtagaaacgactgaattgtacacttcaaatggtatgtgaattatatctcaagaaaactgttttttaaaagtaatgtgaatatgtatgttgagatagcatggtatgtagaagttatgcaggggagtggttaagatcatcaacttgggtcagagtgcctaaggtcaacctcaccataacagttgtgggaacttacagctttcttaatttctctgtgtctcagtttcctcacctgtaagcataataatagtgcctttatcatggtgtcatctttaacattaaatgagctaatatttgaaaagcatttaaaacagtatgtggcacaacataagcactatataagtgtttgagaaataaataaatataggaagactacaatatttgtttcttggaaaattaccttttatttcaagagtttgatcttcctattctattatgttaaaatttccctttgtaaaaaaaaaaaggaaatgttagttacagtagatggcagttattttgtaatatctttaatttgctaaaggaacagttggcacttctatattgatctcaaagtaattttaaaaatattttttgaaattgtacttttccatgaaatcttaaattagagaaccacagttctataactatgtctttgttcagtggcctttggaaccagatggctcaaaaaattaataaccattcaagttttaacattagaagagtattacagatattcagctacctagaaaaatacttatcatataggagatgttaatgaatgtgcattggaatgaatgacaagaatggatcataagtgtgtgacttgctcagtgtgtgtgtgtgtgtgtgtatgtgtgtgtgtgtgtgacaacgacctctttctactggtatcctaaagtctgtatagttatatctgatatgcttgagtttgcatgtttctgctaaccttattcccatgagatttcactttgaggtatttatatggattctaatcttgcagctaagttttagaatccaatcctcaaagtattaagggataattgggattatttaatacccctccccaatttttctgtaatgttttctattagtagtatggctgctgctatgtttgcatgtgttcactatttttatttccaatttctattacatttttatttttcttcctagtttctgcagactatttaaataattttatttggtctgtctcaccctctgtgttggcacttttaatatctttaagagaaacttgaaaatattttagctccatagagcacgtttcagtttaccttttgtattccatagcctggatgtaaggcttctttatgttttgtgaacagttagaaccacactgactgctatgaaaatgcttagtaataattatgcttcctggatccttgtgaaataacctgctttactcaatttagtacacaagttattgagaaacatctatagcctttttcattgcagtgtgggacagtagttcagtgcataggatctgaggcgctgtcacatctttcttgatgtctcaaaaacataccattgattttgcttcccaagtctagatttaccaacatgtgagagactgatgctgcagtgccaggagaattattactgatcataatccaagaagaactgaccagagaattaaagcatttaaagttgcaagaagtaggtttattccttgactcaaaaaggcttagtataacctacttgcacccctgtaagcatctaaattattgtcttaagagaacagaaccataatgataaccacagtattgcttaatatctgctgctgttttaaagcatttcccacagtatttcattgtgtcttaatgttactaaactttatattgcaattgcttagaactgctttaattgaagcaatttaaatttacatatcctactgagccactttgtgtgtgaagcactaacatgtgatagtggttcttttttatagattacaaagttacaaacagttggttgtagatcttatctgtgaaaataaaaagccttgaacaaggctaatgagaatgattagagggaatttattaaaaaattgactaaggcggtccccctccctctatactatgtcagctcacagcgggatgtctccaacatttattgtctgtttaactcatttttggcatacaactattatgcaactgtttcaaatattaatagctcctctccacagctaaactgtgatcttgattttataccagccctaatagtgtcaaggacagaggtgacaacatcttaggagctcaagacgaagaatttgaggtcattgtcctgagaggtcatgtttagttacatagcagggaatggttatataggattacaactgtcttatttgaataatttactgcagccctttgaatgtgtatttttttcatagaattttcagttactttgtctctttgagatgttcccgtgtattgttcaaggcatggatttttattggacatactggttgcaagtgatgataatccaacttaaatggatcctatcattgaaaattctagggttagatctggatcccaggctagaaaaatatcattaagatcatttttttttccattgcacagctcagtttttctctttattggcttcattcaagtagactttactcctacaaccctgtcaccaacataaataatttgccacaaagtttatatcttattgtttcagcaacctcaatagaacaatagcttctctatttgttttaaataaaagtctcaggattgcatctcacaagactgatgcaggtcatatgaccccaattgaactaatcactatagctaggacagtgtcgtgcaccaagactgcctgagatgagagatgagaagtgtggattcaccaaggaagatcatgctgtcactatcagaaaatggaagaatgaatctgttctccccacccaacaaaaatacatagttttaatttctttctactttatgaagtattcccaattatatttctttttcttttatgcgtgaacacacattttctttcctctgtaacaaacttctacctttaacattccccaggtcatcactgcattctccatgtgaacagtaagaataatgagagatcagcgaagaaagcaaaccttaacccctgttcctgccagaactaagggtttcaactgacatcttctagagtttatgccaaagcctacctatttctgatggatgatgtttaaatttccattgcatcctaagctccacttcactttaggctgccaaatgattttagaaaactcctcaatgaagattgtgtaaacaaaatagtggttgagacctttacttatgtcatcatattcatttagtctagcacttttcctctatcattgactcaaagttctctttagccaaacatcattgtgtcaaagatcatggaatacttttgtaatattgaaagaaggcccagcttctcctttcctaaaagtgttatgtcaacctcagttaaaatcagtagtccacagttgtttttgccaaaacaagaatgaattacattggtggtgaaagtccctcttctagtggcagagagagaatctagaataattcacccactcgggatatgggtggtttgcaaggaatgaaaaatccaactagaataagtttccactttgcaaaggacatcacatttgcccacttttgtctaggtagcagtgttcaagaatggggacttgttttttcttcagaacctctagtctagtaattttattgaatgatttcttcaaaaactccactatttcaaaataattaaaaactcatttgaaaatcaataaagccctcaagatgtttttaaagagtttctagattcacattttagtttctcactttaaaatcattgttttttaaaattgaatttaagcctttcataatttattgctaattgaaaacaaaatcaacaataagcataaaatcccagttgtaatccagcacagcctcccagatgcttgttgccctattttgatgtgtcctttcttttgaagagcttgggtgttatgtggtcagcactatccaaacaattaatgtgattgagtgaaaatgccccttcagcagaaatagtttcttctgtgaggaggctaaactgccattagaatgaagaagagttatgtaagactattttttatccaaactgattgggctgaattccagatttctctaatgaaaccttgctgaataactgctatgcttgcagctgtggaagtattcaaaatcaagtgctgattcttgccaattgatctactacttctaaactgcagttctaaaagctaaacccaagtgattgttcaaagaaactgattgtacaggaatttacttttgatgatagtaagtgggccagaatctaggacatgaacatatcagttgttatgacaactgttgaaggagacctgtcttgatagcatggagttttccattggcatttggcaaataataccatccttcagaactcaggagaccatttacaaattaaggatgatgatacttatattttcctagcttctctgaaatattctgaaaactagttcaagatttaaatatttttcttttattctttagcgtaaaaaactttagcaatctttaagaacattgtgatcaagcatcttaggctaatctcaggataaaacattgtgactgacaaaaacaatgctttataagaaaaatagatatgttaaccttgtgagaggaatgacttgatcttgtggttgtcgttttaaaatgcaaataatacatcataagctgaaaacataatactggctaaagattgctcttaaaagaggaccaaagttctgaagtgaatatattgaagtgccaggatgtttattttttatgaatggtgagccacatatacttctactattaaattatagtcttacagtgtctcaaaattttcagctttccaatgcttggcttcttattacgtgcagaaagaagagaatattgatatttcaaaatctagatgtatcagcagacttatattgaaattgttttaaattgatccctaactattcttagttcccagccgttaccttatatattgctgcataacaaatgccctaaaatttaatggcttaaaaccatagccattctcactatttgtcatgattctttaatctgacatgggcccagctgggtagttttgtggctggcagtcactcacggctgtatttagcaggcaggtttgcagtgagctggagctaggctcagttgggatgctgggatgacttctcgctctctgtatagtttctgggcctctctcttttcacatagtcattccatgtggctttttgtttttttgttttttgttttttgttttttttggtagtttagcttcttacacagcagctcagggtacccaaaaatacaaaaataaaaatttccaggccttcttaatccttaaacccagaattggcacagcttgcttttgcagcattctatttattggttaaaggaagtcacagtgccaacccagattcaaggagagaggaggatacaaggatgtgaatgctgggaagcacagctcattggggggcacccaagtaatcatctcctgcatgatcatttattgattcattcaaatggcatgtgatatttctctgttcattatgagaaatactagttacccatatactctgttgtgtcgtggatagatggatttagttagacctagttcctattagtagggctttgcatagcctttgctaatctctgaaaaatatcttctgtatatcaagcagacatgaccttgatttgcagaggtgacagtttatgaggagaggcagatataatcaaataactaaataaatatatgtgttcatgtgtgtgtttatagttataaactatattataaatggtagagggaaagtatagggtgccacgagagtacatgaatattaggaaagggaagtcaggataatattccctgagaaagagatgtgtgtttgaattatttaaagggcaaggagagtagagtagaagagtaaagtgatgggcaatgggagagatgcattccagcaggcgaccttgaggtgcgagagagcatgacattgaggggagaagggtgtttgaggaaatgaatgtagacaatgtgattatagtgcaggaagttagggaaaaagtgatgtgacgtgcgactgcaatgaaaaaatgggagccagagcacatagggacttactggctatgataagaatttgtaagaacaatagaatagcactgaaatatttaagagatcagctgaagatcatggcaaataacaagactgacaatttgtaaaaataaatctatcctttgtgtggagaaccaatttaagaggccaagagtgaatgtgcaaagactaattaggaggtttttacaaaagtaaaacccttccttccttctttccttcgttccttcctccctccctccctccctccttccctttcctccctccctccctctctcccccttcctcctttcctctcctcctcccttccctcccttctacccttcctctcctcctcccttccctcccttctacccttatttccctctttcctatcacacaatcatttgttcaatatatacttctggaatgctgctgtagccagggactcatccgggtgctaaggatctatcaatgaacaaaacaaagtccctgacctcatggaacttacattctgggaatcgtatgaaatatttctcactatcctttttacatacagtcagttctctaatctttatattttatgcacaactgaaagggaaagggtactaataattaccaaatgccaatcatatattaggcatatccacctatgttatgttatttaataactaatggcttactgtgattctgactgtcccatttaaattctgattgtagaaacatattttgtttttgtgactgattggggaaactttaaatattcaagaagttaggtataattatgtgtttatgcactatgtgcatatgtgtgtatgtgtatctatctatatatctatctgtttgtatatttttccctctgtcaaaaaataggtggtttgttcaaagactgattggaaattattttaatatagactgaagatgacagactcatcttcaaggttagaatttgggatggcgaggttagaattaatcaagattatgggttgggatggtgaagttagtttaataccatttaaaatattaatatccaggtggtgtgtgtgtgtgtgtgtgtgtgatgtgtagaaattaacaaagacacctgagtaaagaaggatggcttgggactggaagtgtcagatggcattgatgacaaagagtttggggaaaaatgagaacagaagaagaaaccagtaccactcttgaaaccacattccagtttagggtagccttaactcttgtttcttctgattccagcctgctttcttttagcttttgcctacagttgaccttccttgcagcattaaaagaaagaggttgttaaaaatgcacttaaaaaataacgctgtttttcaaataaaaaattaaatgtctgcatttcaaggcatcttttctacatttataaaactatctggagtcaaggcacatgcattaaggcttacattatttttgtgaaggttcattccaactgggttttttctttggttctctggggcaccctgtttgatttatttgagcagctgtgatttaggattgattgtcactgtaatattatagttctaatctcttgaagtctagtactttgtttttatagttcacaactgggaattaggaagttaacctcagctgtcaccatatgtgacatggatataaagaaagatttcttagcacagtcactttaaagaacccttttcatgtcaataagaagcacttaatggtcaatttacaggttgttactttcctttcaagaaatatccaaatactttgatttattaaaatatttttgaggtttatattcaaataacaaagttgacaggatttagactattgtacctttatatatccattatattctctaggtttgctattatgctttttgttctagctatatttaacctgcatatccatatacttattgatttaatattttgttacagtttcaaaacaaaaattaatgtgtcagtagcccagtcgttaggagcatgaactctaaaatgagattaccaaggtataaattctgattctgtcactatgtgaccttctccaagttgcttaatcattctgtgcctcagtttttctatctgtaaaatataaatagtaatatgatctatctcataagatttttattctatttaaatgaggtaatatatgtactgtacagcacttagtagagtgttaggtacccattaaacaaaaggtagcttttagttaccattattataaagtggaaccccagagagttcccatgttagaattcagcaaagtgaggagttgggttctcagctttgcaggttgagcaattcagttttatcagtgatcccagatttaatcatctcacagtctctcagatgattgaacaaatgaacctaatagtgactaatgtaagagacagaagctccatttataaaagtgacaggaaaatattttgaaacaattactgaggtgatttttttttttcatgcaatcccttttacctgtagttctgtttgcctcttcaatctagatctcagtctctgtgcctcagagaagggagattttattagactaaaatctaatggaggaaaaaaacgtttattaatggtctttgagtttgaaattctaaagccctggtataaatacgaggcaagtaagaaaattcattcagtcaagccctgtttgctctgcctgttgactaatgatgaagatcctcttgacatgggtagaacaaaggaactagggaagatgaaaatgaagtaaatgcagatgttggtccctgaaaagttctctgccctgcaccccactgcaaaaccgagatccctgaggaggcagcgataatagtctgaaatgaatttgaggctccaagagcagaaggacctgtcccttgcttcccaggtggtacctgggaaaatacccagatgctggaattttgtcatatcctgggatagtatgacaccagttgaataggggtgatgctataatacagcatgatgtggtatcttgggccaagaaagcctaagttaacttcactgagtttcttatgatccctagagtggcttgctctttccctctccccgcctcccccagattaaaaatggccacgaattctttctacctcccatgaagggacagagtctaattcctctccccttgaatgtgggctagcctggtggcttaattgatgaatagaatgcagcataaatgagcatctgtgacttccaaggctagataacaagaagttttgcagctttcacttagatttcttagaatgctccccacaaagaaagccagctgtcacataacaagtctgaccatgctgctggagagcctacctggggaggtgctgagactgcctgtaggggagagggaggagctcagttaagtcctgtcttccatccatctcaccaagatgactggcatgtgaatgaagccatcttggatttccaaaccagttcagccacagtgaaacaccaccaagtgacccaagggaagcagaatcacacaacccagttcttaaaaatatgacccgtggggcatgaacattataaaaataattattgttgtggccattaagttttggatggtttacttccccacaatagataaccaggtcatagctcttcatgtgctcttagaagagggctgcaatagacagagttgtctaacttcaacctcaagaagtcttttggtcagagaagaactcacaaactgactcccaagggaacacttgggaacaatgctatagattatattttgtaattatgcaatatctaccttaaaaggacctcaggggagcctctttttttaagtttgaacaggaaaactcattcatttgcacatcagcagtgggcattagcatggacaaatgttgacagagaagcaaacaatactgccatgattggtatcattggagttgtacaacactgcagccttgctagccacccacttactctctaagtcttagacactacccaggaaaaaggggggatggtgaggaaccttcatttcactgggaatatcctcatatggcagaagaaactgtgatttgtctgaagactatcatcttgaactaagttggttatttgccagtaggaaaaaatggagtttgagaattaagaatagtaatagaaaaatgaaacagttattttttagcacaattgagtttgcagcttgtgagatcaatatctaccatagtaattaaatatgtgaagtacagccggtaagccaattagaaaatccccattatctgattagctcatctcttcctgtgtccatttattcttttacagtgggaatggtttttcggttgtgatcagaaccattgtgtctgctccagtatgtactcatgctaggaggataaattagtcatcaggccattcagtcatcagaagttctgaacaaaggtaataggagaagctctgtcttgtgggtcatcatgagcctgatgaaccacttctgccttacaatagagaacagctctttggtgcttagaattcttgtggtgtcccatgccctcattcagtattgttctcttccatacgtgctaaataaattatagcagattctggcttcctggttaccattgatttccttctaatgtgaccattccacaagtaatgacaaacttaatcgataggtatgtttatactgttaattaggtatactcaaagcttgtttgggactttgtaatatggcgtctttcaaggatctcctcagagatcagatttcatttgttatatgttgattttcctaatttaactcagagtcctgagtatctcactgttgcctccatgtactaagggtcactctattcccaccctgtcctgcaagacattcagtgcagtgccaaccacacttaacaagaaggatcccagtaaataagaaagaggaagcatttacatatttttgcttaggaaatgaaaagaaggaaaacttttaacatctcattataaatatctaccacccagtaattgagttatagcttatattgtgcaatttacaattcatatctttaaaagagctcacagttacctctatttgtaagttttgacagcaaaaacctgttcatttcttcatcaaacattcattaatccctaattagtaccaagttccatggttaatgcttattaacagtcctgtgaaaggaatattaaaaatatataaaccacaaggcccataataaacatatgaaatgtttacttttattagtcatcagagagatataaatttaaacctcattgagataccactatacatttatgagaatggctaaaatgaaaaagactaactatgccatgtattagcaaagatagatatggagcaattataactctggtaatggaaatggcatacccaactcggaaaacgttcagtatcccttaaagagttgaatgtacatctaccctatgatctataaattctattcctaaattgtattagtcatctggataacaaattagcacaatgttaatggcttataacaagaataaacacgtatcatttcaatttctggggaatcagtaattcagatgagggtttaggtggtttggactcagagtctttcatgagatttcaggtaatatgttggccaggtctccagtcccctgaaagcttgactggggctggaggctctgcttccaatacaggttactcatatgactaacaaattgaggatgacagttggccagagacctcagttccttgccatgtggatcccatatagtgctgcgtgagtgtcctcctggaagctgacgtgccctggagtgaatgattcaatagagagcaaggtggaagcttttatgacctcacttcaaaagtcatactccatagttttgtgaaatatcctattaatttcataaattagtcctattgagtgtatgatgtatgtatgtgcggggagaagggtgtggctatgcaagagcattgagataaggaagcaaggactattgcatgctgtttttggagtctggctaccacacaggtatttatcccagggaaatggaatgaaagtccctcaaaaccttgtacaagaatgttcatagcagctttatttataatagccaaactaggtaacagcccggatgttcacaggagtctggataaacaaactgtagtatattcacacattggaaatgcctcagtgataaaagagaactactaatgaatgcaataaagttaataaatttcagaaatattattctgagtgaaagaagaaaaagataatatataccatattattcgacttgtatgcaatcctagaacaggcagaactgtaggtgatagaaatcctatgtgtcattgcttctcacagggatagtaggcagatttactgggagtgggtaaaaggaaacttttggggtaatggaaatattccatcaaatttatcaaaatcaactcaacagtacacttatgttctgaagattatatgtaaattataccctgataaaaaatacaaggcataatccaaggaacatgaaagacaaataagccatataattgataagagagaaattaatacagaagggaaaatattaaaaggagaaactaaggtacatatatttttcaaataagtaaacacatggtaattgtagataattttaataatatcttatttttatatttataatctccacttctggaataattgttgatttattttattttgatgtacttcccagtcttttttcatgcatttaaaaaataaataagaacgtttggtatttgagattttgtaaattgattgtgtttgtgtgtgtaaatgtgtgtgtgtatgtgtggttggccttacagtataaacagtcctccaaattattaaagactatttttaagcatcactttcaattgttatattccattgtaagactatttataatttatgtaaccgttctgttactgatagacctttaggttgtttctcattatttaaataatgcagtggagttgttcataaagggtgatctttagtgttgaggattatttccttgggctagggtttccaaaacgttctagatcaaagaatatgtttcacattttcatattgctttctacagggtttaaattattatacacatttaccagtagtctattaaaggacttattttaataggtaagtgaagtaggtatttcactatgctttgataagcatagtgaacactttgttcatgtgtttattaaccattgtaattgagaaaaatggctgaattgagccttaaagaatgaatagcattttaaatatcaattgaaggcaaagatggggaaggttttttctgcaatgttcatggcatggcaaacaaagtcattccatgtcaacctcatggaattgtaagtcatttagtataaaagcttagagcagttgttctcagtcttggctgcacaataggatcacctgagggagaatgtaaaaatctccaatatctaggccttactagaccaataaaatcaggatagttgggtgaagaactcaggcatcagtagtttctaaaagtccccaggtgattacaatctgtaagcaaaatgtgaaaccagtggtatagagtgaggtgaaatgggataggttgccattagagatgaaacagaagagatgaagaccatatgtagcaagacacaatgctctaggataaattgtatacttcctgggcaaattagcaaatgctgttaggttagtgtccctttcttatcatcttggagtcctttacctttttcatgcactcatgcagtgtgcattactcccaaccaacaactagcacctgatcttgtggacaggctgcaagcaaaccgcccccactgccacccacaagcctggagacctgggagttttttctccacacccccaggacataggcctgaagcaatgattgctgatgatatgatataagtaatccagcttcctctttcctaatcaagataattctgacatgtgaactatactagtccattcaagtagccaatatgcaaactttgccttgttatctaggacaagatgagcttgtgccagaacataaatctgtatgctgcttccttcacaaagaaatgtttctatgaaagaaaggtcagctgaagtaaatagtggacttactgacttagctgcaagcatcttatttcatcatggaccagtgacacagaccaaggatctgcaaaccacactttgcgtgctctgcagcagtgaactcatttttaaaatatccttttcttgccatatctaaggtcccggccttagtttagatgcccattagttttgaggtttagaaccactggtttgcatttcaaaacgtaactcaagaaccatgccaatatttcaatggagatggtagcttcctcagaatttgtaaactgaaattctctttgtgagatatgtgttatttactgtagacttcatagctcatagactgattctaaattatatttgtaaggtaacttaggtgtatcccacntatctgacgtggagcaagtattgaaaactttctggtgctcagttttctcacttcttgaatgaggaaaatgaactacattattcctaaggtctctttcagttctaaaatgttatgttcaacaagagctactagattatgtcagtgaaacaaacataaaacagattattccagtagcaattgtcacttctcaaaacaaattgacaaaagtcatacatctattgtaacaacaattctccaggaagctaacctttgcctgtttttcataaggatatgtttactgcttttaactttgctttggaaatgggtaaccatctaattaggttgataaggtcaacatgcaggagctttggaaagagattggataatatttgtgagtgtgtatatttgcctagacatgctttttgtcaagtttattgtactttaatgattagctagaaataataaggctgctgtatatgctattttattaatgctgtgtcatgtatgggtttttcgaaggtaatttgaaaatacagagaaaatataattatttgagggtgcttttagaagaggtggatatgtttataaaattaaatagtaatttaataacacaatacttctcaagacagaattcaccagtatacatggttcatagagagggtttgtggcactgaatgagttttattttccctgattttcaaggagcatgtaaatgcattttggtgtgatcttgtggatcaagaaagatgattttaacatatgtaaatcatttctgctcatcagtttgtcacatcttgtccccaaacaaccctaaaatagttcaatattttttagactcttttgttgctcaacttatctaggaagaaatgtggacttcacagtcatatcacagactttccatttgaaatgattctcaattccattctcttctgggctcttacacttttgaatcctcataaaaacatggggaattaggacatctgtgtggcatttttaaaatttattcttttttttccttaagtgaggtataatacacagataggaaagtatattgatcttaagtatacaacccaatgaatttttacatatgtgtacactagtataactaccacttgaaccaagatataaagcaagatttaaaaaatctcttctcatcccttcccagttaattttcctccatttagaagttaccaccattttgacttcaagcaccataacttgattttgcctgttcttgttcttcatagaaatggaatgataccttatatttgctttcttttgctcaatattgtgtttgtgagattcatgtgtattcttgcctatggtataataaataatcattagcttcatttttactgtgatgtaatactctatggagatttcattttactcttgatagatctttattttcatttttcagttatgaatgtctgttgtgatttttgatgaatacatctactcattcattttttagttgacatagctagagttaacatggctggtttgtagggtagacataattcagctttagtaaatgctgccaaaggattttacaaagtgatagtactaacttctatttctaccagtgatgtatgagagccctagttcctctgcatttgtgcccatatgtgatattgtcagtgtttttcattttaatgattctggtggatgtgtggtagtatctcactgtggttttaaattttatttctctaattaataataatatcctatgccttttcatatgcttactggccttctgggaacctgttatatgaaatactattcaaattttttagctattttcctttaattgtctttttttgtttttgatttgttctttatgtattctgataaatatgtaaaaaaatcaaattaacaagtatctgattccagtctgtgtcctgctagttttttattaataatttattttgatgaacataagttattaattttaaggaagtctaatttatcactattttctgtgattgttcatgctttttgcgttgtgttttactatgtgatttgaaaatccagtcaccacaaaatgcattcaaattgacagatgctaggtttgtttctttccccattaaaaaaattgtaatattcacatacataaaatttaccatcttggccatttttaagtataaagtttagtgttaataaaaacattcataatgttgtaaaaccataatcattacccatctccagaactctttttattttataaaaccaaaactctgtattcattaaacaacaactccccattcctccttgtccccattgtctggcaaccccctgccaattttctgtccctatgattttgactactctaagtatgtaatataagaggaattatacaatatttgtcttctgtgcacttggtataatgtcctcaagatttatccatgctgtagaatatgttagaatttccttcctttttaaggctgaataatattccattgtatgtatataacatactgtgacttaaattctggcttaccatgtttgtctatcctgaaaaatgtcccatgtgcattgagaagaatgtatatgatgttattgttgggtagtgttccatacctgtctattagatcaaattggttattgtgttgtctttcattttcttacttgattttctgtctgattgttctatccattaatgaaagcagagtattaaagtatccaactattattatagaactgtctatttttcttctcagttctgtcagtttttgcttcatatttttattgtcctattggtggcataaatgtttaaaatggttatatttcttgatgtactgaaactgttactaatatgtaatatgtctttctttgtctcttgcagtttttttgatttaaagtttattttgtcttatattagcataaccactcctgctctcttttggttaactctttacatggaatatttgtttcatcgttttatttttaatctatctgtgtctttggatctaaagtgagtttcttgtagatagcgtattgttggattctgttttttaatctatgctgccaatttgtcatttgattggaaaatttaatccatttacatttaaagtatgtaatcacaggttgaaataaagaaggaagcaatttcctcaaagaagtaggtatgccactaccaagagaagggaaataaggtgctgggcagacacaaataatagatgtctattacaaaggaaataaaaatgcttgactcatgtgagctggttgttgaaagtctctggctctcagaactggggctctatagaggatcactgcaggcctaagcaaaatagaaatacaagatgcaattccagactcttacttggaagtcactttcatggggttttaaggccaaaggtggatccctatattacatccatcagaataaagcgctatctgattttctcttactggttccaaggagatgctcctgttggtaaaataggggccccagaatctcccaaattatcacccttaaaagatcttgtgttagtaattcatgtttaattccctttccttcctaagtttctccaacatgagtataaaattcttatggctacaacagcatttagataattgataactgtgacagataaacaacatagttgcttttgaataattgctacttctagtattaactctgtagcaataagcacttcttagggaactctattcaattcttatttctatcttatttatattgggatatgtgattctcaaactttaacatgtgtacaaatcatctggacggctggttaagatatagattgctgggccaaatctctcagagtttatgataacataggtctgggatagggccccaacatttaacaagctcctagtgatgctgctgttgcttgtccagggatcacactttaagaagtagataaaagatacgtccctaaacatattaacatgaataagtcctttatacatcatattttgtctcattagggaaactttcaattaaaagaaactgtattttctttggaaaataaagagcctttattataaaaatgaaaatatttgctcctcaattaattttgcaattttgatttgcttgagggttggggtaagagatagattcatatatcagattaatttcttggaggccatgcatcttgcagaagggaaaaaaatcctcataagtagcattttttaaaacacaaggatagttttttatcccattgcaagtagccttaacctctgctctacagtttttttatctgttcagcctaatcagattttgtggttggttgatttttcttttatttacgtgttcttgttgtgtatataccagataccaaatgtctttaagtagtatttccaattgggattaaaaaggtctgattctaaattctgtcagttccagatttggtcgccaaatgaatcatagaaatcgctacagaggagtgaatcatactgctctctttctatcagtcatggccaataatttcagttagcctacctcataaattaaaatctgggagcaagaatttttttggtagcaacgttgcatcagtactgacatacaagagatgattctgagagtagcatgggagagaggaagaatacagattctgcaataataactgtatcaggtgatatttttcttcacctgttacatttcagatgatggaactttaagtattgagtggctcaaggacttctggggcacagagattccactttagaagctttctttcttccttgaacactttaggtttaaatgtctccttttaggacaaactcctgtttggagtatggtattttctctattctaagtaagtattaagaatcaataagggcctctgtcctctgttcagtttctgaaggaccatgcaccatggttaaaatacttgtccataatatgtcatgatagtgtggtatgcctgctaacatcactatttcatactttgcagtttctaattctgccctaacaagtaatctttaattcttcttcaagtattaagataaataatattattaaattggtatctagtagttatactaaattcatttttattaagttcattaacagtgcctgtgttcaccaccttactcgtaggtaacaaacatggggcatcttcatttaaatcaagtttaaaaaatattctataagttatgtaaacacacaaactagaaagtattgaagataacacaagagaaagattgtcaaagtatcctgtctcctttctatgaatttgctggagaaaatagaaaagtggactaggtcatgagcagaattgagtttgtgtgtatttcaggacaccgttgacgtttccttggctttaaatgatttagaatggtgcctggtggtagaaaactttctggaggctacatgagaagtgatactaataaagttttcatatgtatgtactctcttctcaaagagaaaacattttatttgtgatcttagcatctctctcaaggagatgatatggaagttgagcgtctgcaatggttcgtaaattgagggaaggtttaattcccaccttgttcatttaagtatcatgtactatgataggctcaggggaaaccaagaaaaattcacttcccatgacctcaattaatttcaattatagtgaaagaaacattaaaacaaaattataatacattaagatgattattctaaaagcattcagcataaagtcctatggtgcctacagacacctaatctcgctggacgagtctgagaaggctgcatagatttacagggcaattgagggccagagggaggtctaggaaaatggaggacaggtgccaatgacagaggcataaaggaagactggcttgtcattgtgtaaaggtgtagcagaaacgcagcagccaaggctactcttggaagcagtggctccataatgcctggccttattgactataaaaaaagtttaaaaaaaatttattctgttgtcaacgggggaagagaattttgaagaaatggaatggcaaactttcctagcttttacagagaattgcgaaaagaatcgggaggggagaagaggtaggcttccagaaatgactcccagaacaagaccatccgactggtctcaagagaatcatcccagaaggctgcccgtgaacctttggagttcaagaacgtatagtatgatggaaatcctgggaacaggaggctgccaccaacatggctgctacaattcttcagacaccatggtgtcagtgactccacacagggccattgctgccccaaacctaatatttccacacccctatttgccagcaacaataaccaaagcaataggaaaatagcccctgcttcgcttctgtctgccagctgtctcactagagcacatgaaactggtggaatctaatatgtatttgaaactcttatcgcaaagtagtctgataattgtagtttttgcctttccagactccacaatacaggtgagctctctggaagaagggagaaattaatgttgaggaccaattcatcatatatactagacaaaagatggatgacatggataaggaaatctatagagaagagaagcacctgagaacatgaacattcaagggacaattgaggagactaaggatgaatggtcacggggtcaagggaagaacgcaggaaaatgtagcattatggcaaccaaagaagaacaaaagtttaggaagaaggaagtggataataatgggaaaatgctgtagtgcagcagttatcaatttttgtagtatgacatcttttcagtaacaaaaattctgtgtacccctagtattaggcaagactttgttacagaaaatcaacttaaagtcatttatgcaaaaaatgaatttattgacacatacaactttaagtgcagtggggacagatctagcattagctgcttaagtggtgcaatcgggttaaacctttctctctccctcttttgctttgcttgtctgccctctgtattggcgtcattgttaggcaggctttttccatgaaactaggaaaaactgaactctggaaaccagacctacatattgcttacaacttctgatcccaaaagaagagaactttctctcttctagtatccccaggtcaaatcttagggaagagattgattggcctggcttaggtcaggtgcctttcactgcaccaatcacttgcaggctgtaagcatagagtgctccaattggctaaatctgggttacatgcccatcctgctggtggagggaatcttgtcagtcacacccaaaacatggaaaggatttttccatgagaatcacagaaagttatgatttttctattataaaaagagaaaatagaaaatggatgctaagcaggcaaatttaccagtctgtgacagttccacataagaataattacatatttagaatgtgttacttgagaaaaaaaatatatatataatgacaaagagctactatgaatttagtgacacttaaaataaatttctaaaattcatgataacagctgctatgtacatttaaaaattacatatatatgcaacgatatcttccttttgcaagtaatgcttggggagcttctagatttatgagcctctttcagtcactctgaagcctccaaaacacagatttcttgccttgaaattaagttaatcatggattcaaaaagtagcctatgcacaatttcaggtgttcttacataaagacatgctcaggaaatattttaagacattttcattcagtatatagagtaccagtaaatactgtaccttcaggtgggtgatttgctaccacccaaatagctaatttaaaaaccaaaataaaccacgaaaatgagggtaggggtagggaagcacacacagtttcacaagtaacatcttcttttaatttttttctagttctctcttttctgtttttcatttttaatatgcatatgatgcatagacaacaaatatggaaacattaaatgagaaaaaatatataaaaatgttattcatataatataaataaaaatatacaaataaaacgcgtaataaacacaatatataaaacatatatacaaataaacatttgtatatatacattatacatatatatctatatatatatttgtatatacatatatatattccctaccccacccccccaagattcttaaagcaagtagctttctcttgaggacagcttagagacctgtgccatatgaaatgggatctggacccgtccccagtgccctgtgaagggttgctctgtacattagctccccaatctgcaaaatggatgttgcttgacccgttttctttccgcctcctgggaactggttaaagtccacacaaactccttcaacctccagggacagaaatggcatctacgagctaatgtgagggtccctgggtgcagagaaatgtattaggagctgtgtttccggaatgacggtttcgttcttggtctactgagcgtcaccgagctcggaggacacctctgtcatttcagcagagtgacagggctcaatgattccagcgcccaggtggagagaaagcggctgaggggcttggccggctcctgtcgcgcccctcagtccgccccagtcccatgcaggctcagcgccaggctctccgcccccgccagctgtggctgtgccgcttctcagcttgggccatttgcagtggcctggcctgccataaaagagcatccaccattaggatggaaacgcagctgttagaaatagaagcaccaaagtgaaactgttcttggtccctgaggccacctggtcatcttcccctacattgtagcctaccagaactacctgggctgtaatctaatatttctgaaaaaaaaaaaaaaattaggaaaccctataaaaataataccgtgccatgagtatttacataaacagtgaggtttgaaataggttttaaaacagttaattaacatggtttcttagacatcaaagagcttccaggttaaaaaaattggggaggggggtgtatccttttttacttcagagatatttttgtttcctttttgggaaagcctttactatcttttgctaaataagcaaggagttggtctggaataatttaattcgcttcctggtggaatgcagctttattttccttgttttaaggattgaatgcatctatgtattgattactttgctgtttcaaaagttaaatttgattttataatttaatgaggctgctttctttattttagcatgtggttttaaaagttgtttttttaaaaaaaaaacaaatgagacatctcttttttgaggtaaatcaaaaaatcaaaagcttgaggatttatatataattttttcaattctcagtttatctttgccaacattaatggattttttaaaaacctggacaattactaaaaattgtcacaaatagcagttttactaaagctttgcttttattttgagttaatatattagatttagtacatttgttaagtagttaaggaaactggcagtattatttttttcccaatttagaatctacattgacatttgtagattctaagttagtatggatctcaaaatttgtgctttcaattcacattgagggaaataagactgagctgctgtgtattttcctttcttttcaatgtattttgccttatagctgcataaatagaaaagtaattacttaaaaataagtaatttacttacttagcaaggtttctgatggtagcttttattaaattctcaactaagataattattgcagagaatttcccaacttaaagcaaacacttcattaggttcaagataattaaaaaacacaaccattttatacttgccttcatgatctttctgtctccctccttccctctccctccttttctccccctccctctttctccctcttttcctctcctcccactctcctccctccggctctctttctcatctctctgccagcgtaagtgtaataacttcttaaccttatctcagaagatgaatactatgcccaaactaggaaaaaaatcccacactagaatgatgttgcaaaaattgccataagataatgatgacattttaccatcctgtgacattatcattattgattcttcctctattttatttaatgccatacaacaataggccctttgctggattgaagtgttgctaaaattctagtgtgtttgttttttagatgaatggcagaattgccaacaggaagcttttccaaaatctccattgttatccagagagaaaagaatgacatagcaatgtttttaacatttcaacagcataattttctttgtctctggaaaacgggaagctacgtatcattaggaatttcctgattaatttcctaaagtataagggttctagtgctatacagggagcaacccaggcgacctgctcattaacactaaaaaaaaaaaaaaaaaaaaaagaaaaaaagaaaaaatactttccttggggacaagcaggatttctaagggcttgctggcaatgttatttgactgtacatagaggtttccagcacagatttctcttccagctcagtgaaaataagagtccaggcagcctggctttaaatcagttgatagaaaggcaaagatctcagaaatctggttttaatttatcagctttgagttgctttttccttcaccttttcatgcttgtcactggctgcctaacccaagtgaggcaggtttcctgtagatcccatctgtcttgccggcacctcctgcacttgctggcatcccttgcccttgttggcaacttctgcatgctggatagtgtcccgtcaggtctaggataacggttctcaaagggcagcctggtgccattgctagtccacagatagactgcactttgatgcattaatgatgtttaataccacagtgactatatttttactttgttatactgatcattgttgctgcttataagaatacaatgggagacaggattctgaggctgggtgctgggggaagccatttaaaatctggcagcactggcgggaaagcatacctggtgctgccaggttggagcttggtgcccttttctgcctttttcatgacacctctaagggggagccattgtcctgctattctctttggctttctttttaaggggctgtgcacccatagatttgctgtagccaaaacttacaagaccgtaactacacagttcaaccctacatacaccctgtgatatctctgaactcttctctactcctctcttccctgctcacttggccccagctgtgcttcagacacaccaaggtacttccagacacttacaggcttcactcctgcccctccattaagctgttactcaaatgtcgtcttttcaaagaatctctttctgggcatgctatctaaaattgcaatccctactgctaatacactctatttttgtctttgcacatatcaccatctcacagaatgtattttactcactaatcacttacacattttacttatatttacttattaacttagtatctgtcctccctctgtagaatataaggtaaatgaatatagaggtttttctttttgttcactgctgtattttgcatgcatggaacaatgcctgtcacttaataggtgcttaataagtatctgaaagaacaaatgaacagttagaagcccgatacatttatttcttaatctggtttatacccacagcagcagaaatgctataatgacttgccccatttaagtttgggtcaaaattcagtatactgacttattaatgaagtcatttggaatgagtaagagtcctaggtctatgtcgatcacactgaaataagagcagaccattgattgattcaatactaaatgtgattgttctataactttctgaacacttcatgtaacagctctgtctaaatctcagaatctcatttatacctcatcactgaatatttttagaatattgaaggagtttattggggagagaatgtttactatatctcaatcacttcttatatatgatctattttaattcttataaaaacagtgtaaaaatacattattcctatttgaactgaaattctgaacatctttttaattactcaaggtttcacaaattatgagagaaggttatgatcttttcaagttatgctgtaaaataaggacttctgttagaaaacaacaaataaatgattagactaccctccatgttattcatcctctgttagctgaatattcgtcttaaagtagggccctgccatgccattctcctgctaagagtctgcattggtttcctactggatcaaatccaagctaaggcactcaagtgccaagcaaggcactcaaagcctcatatagtctcatttccccttaaccatcttaggttatttacctcagctgcctgtaacaaatcctctgctctagtcaagaagtttctcttcttcttttcttccttcctccttattagccacccctcctgcgttaggcacccgtttactagtctgccctgcttcagggacttcttatttcttctctgatgttcctttcaggcatgaatgtcattctttttttcctgcttatccatacaccttatggacctatctgtaagatccacctgtaaattacacactttgttttcatgtccctagcctacaacaaataatctctctcatttttcttttcttaattacttttgaacttatcaggtgtaccacacaatttattaatccttatttaattacagactgtagcattctataattgtttctagtgttagccttgctctctaaacaagattgtaagtgcttaaagagatttatgtcttatactttcccgcctatactttgtagagtagaggttgttttattaagagatgccctacaaatacttggcttttcatcctgtataggtatgagtcctgctattaatagaaacaatgacatcattttaggatagatagtaaaatgtggtttatccagcagcagatccttccaatctgatattagttttatgcattttatgagcacacatattttcagaaagtcactggaagattttgcttctgttatatttgaaatttgaacaccaaacttccacattgtgaaatgtttgcatgaacacttttgagaactttagatgaaaggtgtagtataagtacaaagtatgcatcttcaaaaagcaaaatgaaaatgcaaatatttagaaatttcaaaacaaagcatgggaaattttgggtatattgcaaggccaaataattcatcattccatttctagagcactagaaaaggttgggaaatctgtcctttgaagccttagagtatgtatatttttctctttagccctgtgctgtttccttgaggatatgcctgtagcaataaaggtaatcgggaaggctttgaatttctgagacagtgttaagcattttttaacatcagattaaaggtggcaaaagctagggatgatctacaggtgacttcaaatcaggggttacattgcaagtccgtcttttggatgagataagtcaaagtgccagtgaatgtgttttggtggcaagaaaagaagctgagagggtcaggatgcagaagtcagcattttttcaagaaacactgggatagaatttctttgtgtggaactgtaccatgtctggagatacctcacttaatgacattagttgaatactgtgcagtttgtccaattttcaaaatgaagtacatttatgatttttccctgtcatgcatatttattgccttttctttttttgttttattccttgagatagggtctcaatttgctgcccaggttggagtgcagtggggtgatctccgctcactgcaacccccgcctcccaggtttgaacaactctcctgtctcagcctcccgagtactacaggcacacatcaccacgcctggctaatttttttttttttgtacttttagtagagacggggtttcaccatattggtcaggttggtctcaaactcatgacctcaggtgatccacccgccttggcctcccaaagtgctgagattacaggcgtgagccaccatgccccaccctattgccttttcaggaaagtttttggagtgttctgaaggttggggaggatccacattctctatctttagaagctttctctttagtgtccctttgaatgctggcttcagttcagtggataataggtggatcaggctgggtgcatttttagattttgtggtatcagaatttgaaaacaagatctgctccaagggtaggggcaggtcccactggtagagacaaaaggatgttttgccagtttgcaagcagagtgcaatgtactgaaagaggagtgctaagtgcaaagttgcacatctaagccagctgtcactgggcaaagtcctgcaaagtctcacaggtggcaccccatgggccggcccatcacaggaagacagagcctgagtgtggccagtttgtggtgctccaggcagtgggtcatgaagctgggctcaagtaggcctggcagctgacagcggacctagcctttgagctggggatcagagttgcaggcttaaaggagctctcaggcagaaacctggaagacaaggaaggtgggggagtatgataaggaccagctgctgaaaacggggcacacgtggctacaaaaataataataatccccacagataataataataaagatagctaacacttattgatgcttactatatgtcagaaaatgtcccaggtccttcacacattttaactctatcaatccttaaaggctggtactgctatcatccccaccttatgggggagtaaactgagtcccagtaaggtggaatagcattgcagagctacacatctaattagtggtagaatagacatcttaatccaagcattctgggttaaaaagtctgtgtgtttatcctccaggctatcccaccttcaagtactaaaaggtgatacaaaataaattgagtctttacagtttattggaaagggcaaaagctttgagctagagagataaggatttggatctcacctctaccacttgttatttctgacattttgggaaaatcatgtgattatcttagatttgctatatcatatgtagaatgcgggaaatgccatccagcccattgattttgaagaactaagtgaaataatagatacaagctaattagacttcatctggcaagaagctgccactcaacaaatatctgcttgctttcattctctaaatgcccattcgtatagagctctttcagttacttccgattggaaataggattattccagggcacaagtctgggctaagcttgagataattagggaagccacaggtttcaacccttgtgaaaagaagaatagatagatagatagatagatgacagatagagacagatagatagatagatgacagagagatagagagatatagattagatagatgacagagagatagagagatagctagctagctagatagatagatagacagacagacagataaaagacaccacaggctatagtgagaggtgagacagcacctggctgtttcctgcctgcttacccttaaacaatgtggtgctttcttcttttaatttacagaaaaatgtgctggcaagtgcttttgtatacagttaattcaatcaatgaaactttgcatcttaaagatgtaaactaatgctcacttcaggaacaataattggcaaatttaaaaattattcatttttataaacatgttaatcttttgctttcaagattttttgtgttcattaactttgttagtactcagaactgactgaaatgattctaagtttgaatttctataattatgcttgaatttcaaagcctaccttgcataggatggtggctagggcataaatattacatcctatctccagttaaggcatggatacctgcaccatctttcatatgagaagcatcaacacaattctgactataaaatttcatgatcattctttccacctacaacttttttggatctttagctacgaattacatttaaagctattactgtatatactttttctgtacttaaaaacatatttgatagaaatagcccacgtgttcgctgtagaaaaattagattacattaggcacagaaattaaaggagaaaagccacccataattccagtactaaatagtatcaaattttgaggtatatccttccagattattttccatagatgttgaggcatagtacagaaatgggatcacactctacatacagttttgtaatctgtgctcctcagtcagctatttattacaataaacacctgtatattcatatacattatcatctgtagtagcctcattccattgcatttttatagcgatactaatttaggtaatctgctattgttaagtatttaatttattcactaggccgggcatggtggctcatgcctgtaatccctgcactttgggaggtggaggcgggtagatcacctgagatcaggagttcgagaccagcctggccaacatgatgaaacccgtctctactaaaaatataaaaattagtcgagcgtagtggtgggtgcctgtaatcccagctactcagcaggctaggcagaagaatcacttgaacctgggaggcagaagttgcggtgagccaagattgcgccactgcactccagcctgggcaacaagagtgaaactctgtctcaaaaaattattcacattgtttttattattatgaacaaggctttgactgtcatctttgcacatccatgtgtctttttttcatactgattcaaggggcatgtgtgtttatcaggcttttgatgtatttgccaaatacatcaaatatctagaaatagcatgctgactatactccctctggcaataaatgagtgcctcaaaactgtatttttttttcttttcatgtaccatctgatagacaaaataggcatctccttattttattttttattcatttgttttctcgcatggttgatttttccatatcattaatttaaaatttttaatttatccttttttgtaaattcatgattattttctctctctctactgggacatatttattttccttactgatttttaagagttctccatgttgtacctctttaactataaaatatgtaatatgtaatattttcccaggttgtattgtatattaaaattttttgatatatagaagtttttgttttaaaattgattaaatcacaggctggggatggtgactcacacctgtaatcccagtactttgggaggccaaggcaggcagattacttgagcccagaaatttgtgactagcctgggatccatgaggaaactctatctttacaaaatttttttaaaaaaattagcccagtatggtggcctgcacctgtagtcccagctactagggaggctgaggtgggaggatcacttgagcccaggcaacaggtttgattgcaccactgcactccagtctgggtgacagagccaaaccctgtctcaaaaacaaataaatagataaataaaattaatgaaatcattttattcatagtttatgcacttagaaaagcatctggcatatatagtgctcagaaagatcttcctcacccttagagaaataaaacgttcacatatattttctttgagtatttccatagcttcctttttcatatttaaagtttgaattcatctggactttattctggcataatataagtcttaaggcttattttcccaaatgattatcaagttgtcccagtataattgattatcctgtgttccatatgctgataaaaaatgttaactctgtcaaatatcaaattcttatgtatagttgtatctctttggtgtttctgttcagttctattggattctcttctagtctggtgccagtatcaattattataattattacagaaattactcctttgttaatattgtctttcagaaatgttctggatatatttacatttatttatatgaggtcttaaaatacacaagcaatgggagacaagggggaattgcaattgggggtaaataaagcaagtttggaaaaatgttgatattgttgtagctgtgtgatgggaatgtgggactcatgatcctatttactctgcttgcatgtatgtgtgaaagtgacgataacaaaactttatataaataattaggtaaataattcagatcggaactgcatgtaattggaattgcacatgctttcctctttagaaacatgttttttaaaaaaagtctccttttatgtacttcaatgaagttttgtagttcatttctttatatagtccctctacctttctaaacaaacaagcatacaaaacctaagaaagcttcttcatgcctagtttttaagttgtgtgtgtgtgtgtagcaattatatttcaaattgttggtatataggaaaaccttgatttgtaatcaacccagttacttaacttaaaaaaaaaaactctatttctttctttttttttttttttgctttctttttgggaggtttttcaagtagagaatcctgtggtcttcctatagtgatagacttgcctcatcattttcaatatttatgattctcctttatgggatttattagctagcactttaaacacattggcaactgagggtggtggtagtgggtatttttctgctgctcccggctttaatgagaatgtcttccatctttgatcactaagcaagacattggctatttgagaaagatatgacttttggtcccgttttattaaatcttaaaaatcaggattcagtgttaagtgttttcacatgcattttagacattcttagaaaggattatgtgtttttcttttcccttggtctattactttaatgagttatattaataggtttcttactattaaactcttctcacattccagagtgtgtaaactcatgaataatatggatcttgtgtactgtcttacagaaattccctaaattgatggcatttctccatgagttttctattgtttcttgcttctaagtgaatttgggagcaaggagagtgaaataaatggactgaaatttctatcttatactggaagtctggcatacttgcattgactgtcatctacagtagagtcaaatgtactgactgaaattcagctatggttaaagaatgtggcttttatttcttatagcaaattttctagctctagattctagctgtagagccatgttcccattaatgaggtggggaaaaacacccaaactttaattcatttcgggattagaatagtttcttttgggtcagtatgtaaataattgaaagttgagctatatatcagaactgtttttctcctcttcaatgacttctgatgtcttccctaaaacataaaataacttctgggtgcaggagaaaacatacatatcctggatttatacttactagccatgtaatcttgtgatgattatttcagctttctctaccttgatttcttcatctgcaaattggatattaaaatgacaactattttacagaattttgtgggaattgaattagttaatatattttaagtgattagaacatttcctggtacatagcaaatgccccataagcgtttgtaattataatataaaattatgattgttctcatagtgttaggagtgaagtggactttggttcatgtgccattttccaattgagtgctcttgggatgatttggtgtctgtctctcctgcctccactttgaagtatctgaagctggtttaatactctaattctgttctcttgccataagcaaagaataggaattacatctgtttttgccaactaggttggcacccaactcttgctgggaatatggggtctctttccttagtaatatttatgaatgagataatctgtaacaatatcttggtatggtatgatatgttgtgacatcatcttcatcttagcagagtttggatgagttagaaactgaaagaccattttaatactaagtttctttcattcagctacttctacttcagatattaaatttggttttactttttcatttatatgctttcgcttatattacttctttagtgaattaaagagatttttaaagagaaaattctagcttctcaagcatcattgtccttctgaaaaattgaactaataagccctgagatgattaaagcgtagccgatccttagaaaagaaattgccattttccattttcactaagaaattcatctattagcacaataatatttatgagattttgctgttgtgcaatccctcattcatcccttatcaccattttgaatgaagagagagcaaaatctaattccaggtgccagatgggtgccacacaaatggcaatgattcagcacaggctccagttacagataccaagctctgaacagctatttggataatcaggagatcttggtgaactgaggtgaattttcttctgtgtgtcaggtcctccacttgttctttctctatattcagagcctttgaatttgctatgaagcttggtatctgctttgtcctagcagttaagagttggtgtcacaattcacatcttgctggaaaagtgatgggttcattttgaggctcattgaatgagtccttgaagaaggaagcatcaaaatgaaaaggatttcaaatctctgagtataaggtttgaaatgttcatttgacctcactgatggctgtggaaaagcctaggcttggacacagaaactgaaggttaaatcttgtactataattgagtgtctctagaattagtacaggcttctctcattttgtggcagtgtaacagcagactaacaatcctgggaagagtgcatttttaatgaaacatttttgcagggttagtaaaatccagatctcctaaaaaacccaatgcttgcttactctaagatgagaaggataagccaaattcaaggcttctcactatgccaccaggttatacaataaattttgagctcccctatcctacatttcgaaggattaattctaactgtaatttaccttgattcttagagctcgctgaggctcttggtgttaaagacatatcaggggacaaagtaataaaaagcttacatttaaggagtgccttcttagagttaggtacagtggttatatacgctgacatgtaagttcatcatttagtttacacagtagtagccttgaaatgtgagtttcagtatctacatttatcttgatcctgacattgacatgcaaaagggttaagtagtttctcatggccataaaattagaaaatggccaaaacagaatttgactccaaattctttggaatatggaatatgactgattccaaaacctaatattccactgattagttttgtctcttcatctctccgaatcaacatctcttacataaattacttttgtttaggggatatcttagagttcttgttttataatggagtgagaaaaaaatatctccttaagaacaaaggaattaaaacaaggcactacattgaaggagtttattttatctaccacatatacactgaatatgaaagaaaaagagtatattgaaaatgattctctaatggcagaaaaatattataatttatgctgtactagatcttgattttgttgcttgttatttttaatgtctataataaattggtaaaacagtaaaactcttgaaaagcaaaaaaaaaaaaaatccaaattctttgcccacttttttttctgctgttattttatttttaatgtaaaaaagccaactgctctttatcattcgttagaaatttgctccaaactaaggggcatgtacagttttcaatttgtgggtgttaatgactccaccacagtgggctcattcccttgcaagggcgctaacgggctgttgcttcctaagagacagaggattgagaggttttggtttctactcatagtctttggtttcttggctctgttattttccttgtttatgtttcttttaattaacattgagtttcttcattttatgccttgcttttcttctgtttgtacagtctgccggcaatgactccttgggtagcacttgttaattagggagaaatgatagcttgagggtacttcctgacttacttggtgctaggataaaagttgttctactgaagccgcattagaacaacttttatgtacctacctcaagtaagatctgcatgatgctctaccaattcccttttgtctctttgatctttactttaactctggtttattttatttaaattctcattgtgtcccaaataatctaaaccaagagtattattaggtcttaaaataattcacttgtatttttcttaaggaggctattcacagtagattttgtgggaaaataaaaattagaattcacggctgattgactaaataaaagcaactaaagaaccaaagggtatgttgattttaaaaaggaacttctgaaggtatctggctcataattacccagagataataattttggttctatagctcagattgagaaagctatacataatataatgcaggatctataacatggattgtctttctcaatttctcactattcctcactctcacctttccttctctctttcagctacctattcctatctaatctatctatctatctatctatctatctatctatctatctatctatctaactgtctatctatctatctatctatctatctatctatctatctatctatctatctatctgcctatcttgtttttgccagagaggcagaatggttcatgttttagaacctagttggtctcatgatacaaagtacagactatgatttgtaattaatgatttgtagacagcagtctctacatacattctacaaccctcagtgaaatgccatttctaatacttctcaaatttacaagtattcagacagcagattttactttaatatgggacaaaaaaacattaaaaagaataaaaggctcagtgccttgatgaactccacttttctttgtagctagtaagcagcttgcaccagagattttatggggatcatcttgctatcattttattttcctcatgatgactcagggaattttatcctgaggctctcaatggatctgttatagtcaagctgatgatgacacatctcagaggctcattccatattgggcctcaggccagcaaactacgcaccatgctgtcctatgattcacaggacgaaactgctctagacacctcccactgcccaggcaggaagggcaccataatgaggcagtgggagggtgtatggctaggaaagttgctaaaaggaagcttttgttgtaactttcttctctgctgcaggaggctaacaccaaagcaaagtattatcaagcaacagaccctacatttatgcaatattaatgagaaggtccctggacttttaattagggtggagagttgtgttttagagagctgaaattattttaggtgggaggaaatggaatcctgggagaaaagtaattaatttatagctcaatgactgaactgtgccattttgaaatactggtcaaggtgagcgttgaaagagtgggtactctggcatttccatacccttgggagtgaagaattaggctatttggggagccaaatgatatgcttgtatttccaaaaatgtcatttattttgtaataaatttgtgctgaaataaaaagtggcttgtgttctctatgtaagtgtgaccgcctgcatattattcattcaatggtcatttacagcatactttataggtgtggaattctacagatgccttttctacagggacaaagttctgactagatgcacaaaggagatgaaaagaaccgtcaatgtctactttcatgttcctttccctctacgtggggaaaaacatcagtatatgaaatggcatttgaataacttaaagagaagtgttcacaagagcagaataactcggaacaggctttgaagccattaggtgtatgaatcatttactgcctcctcgggggtcccacaccagctattctgagattctgtcagagcacttagtgtattgtgttatttgtctctgtcccccactagaatgagagttccacgtggagagagatttttatcgtatttatctctgcatccctggaccctagagcacagttcattgcataccacaagtgtccagtaaatgtctggtgaatgaattagtaaaatagattgctgttatcattttggaggaagagaagggaatagaatgatggttttatatggacataaactacaaaggaaatgatttgattcttttcagtctggagacaaaatgtgcttttcttctcttaattctctgttcaattcagcagaaatcagtaaacatttactaagcatattttatgttgtaattgtatatataaacatgaaatgttttctaacctcaagggacttagagtccagggcaaggttggcagtgacgtacaattaaacagatcattttgatgtaatttgacaaatatactgtgggaggcattcaggaggcattatggagggagtaaaaagggatgttaggtcaggctggcagtgggaatggggctgggatattgggagaatcaggaaactcttccaggaggagatgacacctgagttgagtcttgaagcaagacattcccaaacaaaggaagaagagcatggctatggggtaaaggaagaggggaaaaagtccaagacagaggacagggaggtgagaaaccgtatggcgtatgcaaagaattacaagtggttccctatagcaagtgagtgaaacaatgctgtgtgggaggtcaagggatgatactgcaaacagcagacagggggactcctacttaccatgtaaaggagatttatttggactttatgctgtaggggataggcagctattgatagattttaaggtggacttgaagtaggcagtattggtgacaagaagaacattagaaagtgcctgaatttgtgtagataaaactctggaagactgtggtagtggtagacccctcttagtgtatgagatatgtatgtggcgggttaaagtatacacatggcagctaaaacaatgaaaactagtggattatcaagaaatataatctagaacagaggctcccaagtgccaatcaaaagtggtggtgctcttcacccttcatgattattatctggggtattggtcaaaagtagattcctgagtacctgtcctcaaagttctgattcattggtggagagtcagccatctgcattttatggcattccctagctaattttgatatgcagtcatgtttgggaaatgctgataaaaataatatcaatggtatcactcatattttagatgtagacaaaataagaagaccccgtgaagtagcaagaagttgagcagtcagttggagaaccagcagaagacagaggaagagggattttctagaaggcaaaacaatgtgatagcagagagttctagtcagataatttgtgaaaagtttgttagattttgtgatatggaggtctaggatctttagagaaagtagtttaagtgtggaaggagtaaaacttgcttgcattgggttgaggggtagacagtgggaataaggaggtaaagaaagataacagacattttttttcaaatagcttgattttgaagagaaagagaatgatatcttgaggagggagaacatagggttataaggataatttactttttacaagaggagagactcaagagagtatttagatcttgaggggagagaaccagttagaactagagcagatggaggaggaaagacaggcataggtagaagacaggactcctcataggaggagaaacacctcactcatcctctcagacagcgggaaaggaggtaagggagagtaagctgggtgaggaaggaagctgaggcataatttttgatgggatgttcagagagacattaagaggctcaaatagttgaaagggtacaaagctggttgaaactaaacctaggtaaagagccctattgttaacttactattttaaaaatatttttcttgaaaattgtgacagctttttcttttctttttttctttttctttctttttttttttttttttttttttgagacggagtctcgctgtcgcccaggctggagtgcagtggcgcaatctcggctcactgcaggctccgccccctgggggttcacgccattctcctgcctcagcctcccgagtagctgggactacaggcgcccgccacctcgcccggctaattttttgtatttttagtagagacggggtttcatcttgttagccaggatggtctcgatctcctgacctcgtgatccacccgcctcggcctcccaaagtgctgggattacaggcgtgagccactgcgcccggcctgtgacagctttttccacccatattgcatttattttctaacttataataatatgaacctattttgtagattgagctcctgttggtcctataaaacccaaatctcttgcttgctgattcagttgtttatttgcatttgtctcatgttccatgtgttttgcattcccggaaactagcacaggcagggaggcctcaacacctaatttatttcctaggtgaagtggaacctgaagattttccttttatagacaccattactagatctgaaagaaagaggtaagttaattgacacccaaatggaggatgaaaatagtagagtcaggaagagagaacttaattttagccatctgttttccaacttggcttttctcagtctatagattcccaaaaacaaagtctaacattgggtacgaaatagcaaacttgagcactgaaaaacaaacaaatgagaaagcaatctaacaattccacgaacaaaaaactagcacttttgtatgtcctctgaagtaagaagagatgagtaacttttgtattcactcaaatactttcttttaatccaacttttaagtattttttctaagtgttgaaaatttgagaagccaagaaacatagaaatgagacagaactacccataatactgtacctaaatataactactaatattttgctaactttttcagtcttttctctgtgcataactttttataggataatattacacatacaactttaatcctgcctttttcacttaatattataacacaagctttttctcatataattgaaatatcttgcaaaatatatgattttaattacatagtacatcatgaaggttctcatattttatttagcaattcctttactatttgacatctaaattgtttccagattttcattattttaagtagcactgctggaatgtttctgcatacaaagcactttccatatttcaagttacttcctgaattatgatataaaagtgtataataccattaaagcttttggtacttattatcaaattcctatccaaagacttatgtcatttggaaagttgatcagcaatatatgaaatgcatatctaattatatatacaccattttcaagtattttatttttaaaagtaaaataatttttaagcaagacaaatcttgagattttaattttcattttattaatagtgagattgaatataccccatattttgatataattttatttccaattttgcaaaatttctacttattaattaaaacattcatttttgtagatttatacctctaatttttaacatattttgtaaatggtacaatgtatgttacatattaatactatggcaaaggcaaaagaatgataatgaattgctttcaaacttaaatatatatatattttttgagatggagtctcactctgccacccagcctggagtgcaatggtgcaatctcagctcactgcaacctctgcctcctgagttcaagcgattctcctgcctcagcctcttgagtagctgggttacaggtgcctgccaccatgcccagctaatttttgtatttttttttaatggagacagagtttcaccatgttggccaggctggtctcacactcctgacctcaggtgatccacctgccttggtctcccaaagtgctgggatgacaggcacgagccactgtgcctggtagaagttatattttttaatcatacaacttgcagtatggaagagactttacaatgtaccttattcaaccctgtattattagtttgttttcatactgctataaagaactgctcaagactgggcaatttataaaggtaagaggtttaattggcttacagttctgcatggctggggaggtctcaggaaacttacaatcatgttgaaaggcgaaggggaagcaagacaccttcttcacaaggaggcaggaaggagaatgaacacaggaggaactaccaaatacttataaaaccatcagatctcatgagaactcacccactatcatgagatcagcatggggaaaacagcctccatgattccattacctccatttggtttctcccttgtcacgtggggattatggggattataattcaagacgagattttgggtagggacacagccaaaccatatcaatgccccagttgaagaagcaaagattaaacccataaaacaattattgaaaaaaaaatgttagctagtagatgagtttgtggtacaacatactttttgttattggacctcagagtcagtagaaatctatgtgacttggcgcagtaggggaagttgttattagaaagaagggcttttgttggactttgaataggaagagttctgtaaaatgaagagaacaaaaattaaagggcatgaatctaaggccaagaggtagaaatggatgtgtctcaggtgcggcagagatgagaccagcctggagggtagagggctggtgttgggagatacagtgtgaggtaaggccaaattaagcatgcaaatcacagatcacttgactcttctagttgaaacacatcactctggagttcctactgagcataagctacaacctgattatataaagccatccttgtggttacaggtagattgcactgactttggcaagtttcaagatgttaaactgtgctgggaagactacaagatgggttgacagataaaactagttttaggaaaatgcatgcacagggcaatattatcagctagccacagcaatggccatggaatacagggtcctctcattattgtgttgtcccaggcagttctatgaccttaggcagactacttatgttccctatacttcaattaccctatttgtactctacgttctttctaaatctcagattctatagcctctagcaggagctcagataaagcatagcttcagataaacagcactctagagaaaagagagaaaatgtaaatagcaggaaatctctattgtcatctttagatctggaataagaagtcctttcttttaattcacaattttagaaggtatgaggagatatccagaactttcttcccttgtttctgctaccaatgtagcagagggccaactgaagcagatgttcacattatctatcttacgtgtgtagagggcaaattagtggacatttaagagcccaaggcaataattcaaccattcccatgaaaaatctgttattccatccttgtatgtttcttttcttttaactttttgagtatttaattcttgtgttgcctcctcctaatttccttcctgcagatactttggtgagtaaaccttgataaattaagcctgtttttattatattcctttggagttgtctttgattgtgatcaagcttctctttttatacatgccacatgtattcattcttcatttagatgagaatctaatcaagggaataaactgccaagtttggtttcatttatgcaaccctagaaaaatatatcttttgatgagttggagacaacagtaagttagagacagagctaatccattacaccttgatcactcagaggcaactgtacccaaacaattctttccctttgcatcaagaaagtttgttgtttatctgagagcttagtactgtgcctggcacatataaggtgctcaataaactttttaaaaccaatgcatctgagtggctttataattcagcagttactgtatgaactgacttactatgtagaagaaaaaagtattagttcaaaaagaggagattaaagaattcttcttacatatataaaacatgtcctgttcagtagcttctctaatattttgtggatgattggaatcccttttcactcatatttaaggatgtcattatgtatggggacatttgctgtttcaatacatagatttatatttgcagggaacttaaagtccccggaaatttttctgagatattatctgattaatccccataacaacgctgtgaggtgggttgtggagatatgaggggaaaaaagggaagggattttcctaataccatacagtttgtgtatatgacgtagcaatgaaagtagaacttatttcatctgatgaccagttcaagacattttctgctatataaatctttaatctctaggatagaaactgtcttaattccctttgcattgacacagcaaaatgtatataggtggtccatctaattccatctctgaatattccagcactatctgtcttatccacctcctctattcatttttatttctaaagtgttctccctgcaggagctgactcttccttctttctaattaactttatgtggaaactcctatcgtaacgaaattgcacgtgtgagtgttctctcgcctggctttctttttagtgcacctggagggagaaagcttttctgcagtctcaccacattatctttgctgagagagaaacttgcaggaactaagataactgccttcctgagagtcaaccttttcatcaaacattctttagtttaggcacagctttgatttttgcagaggttaccacttgttcataattaaaatgcactggttcatgctattggcagcaaagcactatggaagagtagacaaaaacgtggattttgaggcagacaaatcaggtgtgaatactggttctgccattcctgggcaatttacttcattcgttgctgctgatttcctcgtttgtgccatgggaaaacatattaacaatgtctacctcacaggagtattggaaagtttaatgatacattatagagatttttttaaggataaatgaggtagcagaacatgcaatcctcttcatagactgcagagcacatctaccatttcccctccatctccactctcctccctgccctaccttggggggctttgaaccctggaaggctgaccagtcagatgtacttcttcctcctttgccctcctgcttgcttgcatttggttagtggggagtcctaggaggagacagatggagaaaggaaaatgagactgcgtgcaactggttgtcttcttctttttagggtctagctgtgtcccagagagcaacttcccttttcaaggcagcccactctgtgtgatgctttttcctaggtatgggcaacccatccctcctagggtgaaaacttcgctgttgctagttccaggtactgtgccatcctttgtggattcctctaccctaccaacatctccttaaagagtctctttgttgaacctgctgtaaatgatcctaataaaagtatgctgtctgtttattcttggaccttcaactggtagattattcatactggttagtggaaagtagatctgcctacatatgtattatttgagagaggttagcacttatagaagaaaaaacaagaatgggctgtttttacttgccatttgatactaagagaaaaagaaggtagtgatgatggatgatgataaagatatgatgatggtgagacccaaatacctcctatgagccaaacattctcctagacaatactttttacctcattcattttgaaaacacatatgtgtattattatctttcttttgtagatctggaaaaagttcagataaatcaaataatgtacctaaaagctacatagaatgccagtggagagctgaaattccaacctatacctatttggttccaaagtctatacccttttactgacgctaggtgcctcctagctatacagggtgagaagagccattccatcagcagtcagttttcaactgaatctctctgcctattgaaatttctctaagttctaaattcccataggaaagtatctcttaatgatggtctttaaatgatttcaaggcaaattttttaaaaacctggttaattcagcaaagcttatcaggtcaaatccattatttgtctgatttgactgatttgttaccattgagtcactagcccagtagggcaactattccatggttgtccctaaggctactcattaaatcctggatgaataattaaatattttgaataagtttttctctgataatatatgtttcctacggctgttatctaaagttttttctccctagatatggaatatttcattcagtttgtattaatttctgtccaattcctaaattacatgagtaacataattctgcattttctgggacctataggatgctaatttgtaaaggtgattcaattcctggaggtgtactagctgagaactttccattgtggatcagctcctcccttcaaatcctactcctttagaaaaaatccatacacactcagagaaacagtatttatcttagcaactcacatttgattgtgcatttttctttaatcttcaggcaagcatttctatcaaccttggaagaaggctttgtcccttgtttccctttgagtccccaagttgcatccagagatattcttagccacagtgaaccttacttctctgtttctacctctactttgctgttacgggacctcttacctcccgcaaagtgtcttccttttattttgagaagacttgagagggtgactcacatatattccaaacaagtattttcagcctttaaaaaggctgtgttccttgcaggcttctctgctttcattttgtatgtttttttaaaaaatgatacatagttactttgttttttatcttttaaatgtataattcatactactttgtactttaatattgtcaatcattttagcaaaaccagctccttcagaccttaatcactgttactcttttccttaagtctcagacacatgttttttgagaagcttacaacaaacccaaatgatagaactacatgctgctgttagcatcagcctacacctacactattagcctaaacctgcaatatcagagtttttgtggtttgaccaagccttttatcctctttcccttacagtaagttctttcccagaaagaaaatatcagcccacatgcaaatatatcttataaatatgtaggttgtgtcctgatgtagcagaatatcataaatgaacacagcacatatagctattcgatttgttctttcttcaaaactcaaaatggagaatctccactgtagtgtctaggagaaagcaaagattagttaggtaatgaggatgtcaatgtcattcaagtggcaattactctggaatattccttgaaataacagttactgcttacttaacagttattgcttatactttttgttctcatcttctcaagtattccttacaaccactaagaactaaaggggtagataactcactaaatttactgaagagtcattggattggcttcaaggtactattgattattgtcagtgaaacaagacgcaatgatgcagttgctcagagggctcttttcttcacatgtaagtaagattcctccagcagtggatcaccttagtgatcccttagtgaaaaattgtcgaatccttagctgtcccaacaagaatcaacatatacacaattcagtttgcatcttcattttatacatgtaactttaggttatggctatcatatctgttttttttttttttcagccactaaaactgtagagttgaatatttaatggaaaacagatggtgcttgaaatctctaacttacatttaacaaaagctgttttggaaatgttgcttatgtatacttttttattgctttaaacacagcaccgttttagcctgttccgatgaattatttaagaattaactgtcccagtctaagacagcatttcaaagtgcaagtgttaatcataacttgattaaacatttccttccttttcttttcagcattccagttggcttttgagtggatacgtgcagtgagatcattgacactggaaacactagttcccattttaattacttaaaacaccacgatgaaaagaaatacctgtgatttgctttctcggagcaaaagtgtaagtaacttttgttttcatctattttctaaacacatgtacatataacattttagttttggttttggattttaatgctatgctatcatgattaggcttgtgggaaacgtttagtcaactttcagttctctgactgtacacagcttattaacaaacaaagactagtttgtctgtgtgacctgttagcatttgatgagaattctttcagctagtttatatcttaccattcattcatatacgtctacaagcctgatgttgaacactctaatttttgagtgcatgcagaaaatatatgattaaaagtcaaaatatagggaatttatgtcttgaatatgaaaccttctgggcaagtctaaaagcataaattatacttatgttattagttacttcaaccagtcacattctgaaagttcttcccttctatgagctttctaccctggcatatatctctaatttcttcttttaatctttttttaaaaacattttaaattgaacatcctcagggctctactgaaggttaaaccttatttccaattatgtagtgttcttaaggtaccacagtcatgatactttttaaatttatattagtgtatggaaaaaagcaaatagagcaactcaaagaaagccacacaaggaaaggatgaaagcagactattaatttccatcaagcaagcgctaagaacacatccctttgttcatttacccaagggggataaggcatccaaacagatgtacttgtgacgtaggaacattaatttgaaggcatcagaaaaaccacaaatgcaaacacatttctctagtatgggaacactttgtgttataaccagtgattctattgtggtggcccaaggccatctttcattctttctatggagttaccatccagcttttaagggtgaggcatgagtatgtgcagataaagtatagtatgcccaactgtgtttgttaaaaaatgaggatatgctgagagatatgccaatcctttgactgaataccgtgtttaataaccaaccaagtaaattcaacaaactctgaggaattgttcaaatttatgtgttttactggttggtgtttggttgtatggattattgcataaaagaaggggccatggatttgagcctggaattccttttatcatcatacaaagtcactcactgtaataggaggtgacctgcatacaaactaccaaactgcaaacacatctttctcttactgagttttcttattataaattaaatatgaaagcaaactattcatataatgttttctgttattgaatttcagagacatgagatctgaaaaaaaaatgtgtaaaggcaaaagggaggatattttgaataattacaaatgtcattaaacatttccctattcttggaggaaaacattgtaaaagcaaatgattaactgagcggtgactttaaggaactgagactacttaatgatgctaggagacttcctatttgtatttgtttaatgcaaaaaattttatcttggtggaaaggctcaagctttccagattaagagaacctgagttgcctacatttgtcaaaatgtaaacagtagaactctcatttcactgcttcctagcttcttgagaatccactggcataaagaaaatgcttccacttaattaaatgactctaagcagaagttaatgtttatcagaaaaaaagagccagacttattgcctagttagaagttgtcactttagggctataaaattttattttgctctggtctgagcatataaccctccaacgcttacgtttttgccataatataatccaaaattgtatacttagaggtagatttttcctggttttgatgaagaaagtttaaagaattagttctctttagaatctgaggatgtttatctttggcattctgacatttggaaatccaaagaaaatgttcgaaatttaaaacagtctctgttcctccctacatgcctctcttgtaggtcttgcatctttcattgtgaaaatttaaggcatacaaaagaggtagaaaaaagatcatccttaaacgatcaccttacttagtgagttcctctcatgagaggggttccagtgtgtcttggaagaccatttagtcactcttcaactcaaacaattcaggcataagatgggtggttaaactatgtgagtgttctgtttcctaccagttatgaatttctatgattctataccatgttgtgctcattcgtaagttgaatcaaagaccagttcccaaataaatataaaatcaaggcatcagggcaaacagagtatattaatcagcttgggctacaatataccatagactaggtggcttaaacagaaaagtattttatcacaattctgcaggctgggaagttcaagatcaaaatgccaaccaattttgttcctggtaagctctctcgtcctggtttgctgatggcttgccgaaagctactttttccctgggtcctcacatggcagagagagaaagcaagatctctgctgctgcttcttttaaggtcactaatcccatcattagggccccaccttcatgaattcatctaacactaattacctcccaaagaccccacctccaaaaaccatcacattgggggttagggcttcaacaaatgtatttcagggggacacaaacatttggtccataagagagtttgatattcttttttttttttttttctgagacggagtcttgctctgttgcctaggctggagcgcagtggcgcgatctcggctcactgcaagctccgcctccctggttcacgccattctcctgcctcagcctcccgagtagcagggactacacgtgcccgccaccacgctcggctaatttttttggcatttttagtagagacagggtttcaccatgttagccaggatggtctcaatctcccgacctcgtgatccgcccgcctcggcttcccaaagtgctgggattacaggcatgagccacggcgctggagtgcaatgccgggatctcagctcactgcaacctctgcctcccaagttcaagccattctcctgtctcagcctcctgagtagctgggattagaggcatgcgccatcacacctggctaattttgtcttattagtagagacagggtttcaccatgttggtcaggctggtctcaggtgaatttgatattcttaagggatgattgatttaataagtcactgtcttgtttaagcccaaagggtagtgactagtataatggaatctgtatgttttcccaatttggtaacactgaaaatgatctggtcaacatctttctcttcatttcttattttctaaattttatgttagggacattcttaccaatgatttttgaagtctaataatcacttcatagacctagaagctaattttaattttactgaaaatgattttcccctttcttcactattcttagtttgcttattttatattgttctttcttaacatctaatccaatgacaggtctctgaagtatcttgtcctatcaatggatttactatttaacttttcagatgtttatatatttcagaactgactatctcagttacccttcttccctctgctaatgcctgctttcttactggcttttagctaatcaggggagggaaggaaaggtacagacaagagaacaggatataaaaatttttgttgtaattatatattttaaaatcaggagttaaagtaaaaattttagcattttcttttctttataatatccctgttattctccaaactcatgaagttttataaatcttctcatctggagaataaactagataaattttaattcttattcattaataaattttcttgtgtattaaattctaaactttcttgtagtcttttgcattaaattcccaattttctagtacactgaatcattttcttcctaccagtttgaagatattcaagatgtcatctacttaattggatttgttaattttcttgatgaaattgccctttatttgacttaggattcttatggatgttctacttttggataaatttgtcactcaccagatgtctttgatgttccttgttcttttttgatagaattgttgttcagtgttcattcaaaactggaagcaactccttggtgtttggaagacatagggtatctggcacattctttcataatgaatttaaagcccacctaaataggctgtcagttttgagtctgggggctaggagcccatctggtgaaatttttcccagtaggctccctagaatattgcttattttcatggaagactttaaaaaattgtacaaacttggtaaactaaagtgattttattcttaagaaaatatatatttttttccatctgtacctttacattgctgagtttttagaagcagtcactcacctaatgacccagggtgagttatttatgccattttatctgcattttttagtgtcttcctggagtgggcagccaaaaaataaatttagaaaagatggtacattttgttatggcacttcagagctatctgcattcatttttcctcacaattaccctgtaagatagagtattttttatttgtatggttaaagtaaaaataacaaattccttcctagatgggcttcaattctctactatattcaaccccacctaagctacgagattgacaaagctgttgcagcttagaatcctaataaagttaaggatgtataaactgatttttttcactggtattcactcagcagggtccaagaaggtcacgggagatgctgtaggtaaaatcctttgaaaagcacaaaatacaaaacaaaaccaagttcctgcttgtgtctttattcacaacaaattgatatgagaagttgtagttttagagatttcactcctttggtccttatacctgccttccagcttgttctccttctttacaaagttctacaaatatttactgaatggctactgtgtgttaggctctgagtatccaatgtaagatacatgttctctctaccctcatagagcatatctgataactaaatttataatttttacaatttgttaaaattatttcaccaccctgtctccctaaccctgatcacctaactgtatcccattttaatctttaattctttttaggaaggctgaagttctgtatctctctgaagtctctctgtatttgcacttcatcacgttgtgggcaccctgtttagtagggatattttgagctgtgaataatgtgctataattgacaattatgctcattgttgcagaaacatagattatttcagagtagataaaaagaatttttctcagataatcaacaatagtataagaatagccaagagtataaataaatgtgagaatgacaggaaaggtctgaaagaacagcgactgatcagcaaccatttgctttaaatcaatcacatgtcacatgactgttttagtggccaaagccaatcattaaattgtcatcttggaaaaagttccacttttttctgtactgtgatgtgtttgctatttcatttttggacaatttcaagttgaagttgaattacaaatgattacgtccaagaaataattgcatatattgtacttaccagtgtaaacaccacagatacaaaaaaatggagagaaatcttgttgcattgttaatgaatattaaaaaattattcttacagacaaaatctctctataacaaagtgaaattttgaagaaaagcataactggtggagttttctatcagtagtatttgctctagaaaaatgtttataatggctgcttatttttaactgaaggtaattttcttttaaaattttgtttagctttttttcactattgaaatggcaaatgttttgaaaactaaaaaattgacttcaattaaaattattagtgtgtttacattgtttcccatggtcagcactttcaagggcagaactggaattgtccctgagttatagttctggctttgcatctgtgcatctatgtcttggtagaagaagtgggagtaagagaaccataagtaattagttttattatcaaatgcttccaatagcttgcataatttttttcaagggtaaaatgagaaaaacagcattgaaatcacattaaaaaataaagcaaacaaaaaatccaaaccaaatcatcaagcagaaatcattttaaaaatgctatacaataatcaattgtgttcaatacttctgcgccaaaacctttaagtcttaaagctttcctaaatggaattagtccatcaataagcagataacaactttacttttattgttgaaaaatgtcactcttgtcagttcacaagtttccctaacttgtgcaaattaaaagccatgacagcaaggccaagaatggttcgttggtatatagttagagagaccctgaccctgctttcttgttcttcctattacccaggatatgtcatacgccacacacatgggggtagggataccgccctacttatagcataagaactgagaataagacatttagcttataactcttttatggtaatattcccctcccactgccattcttcctactcaggtagtctggacttctgttttggcaatattgcttccgtgagaaggatttgactgtacttgcagccctcaacatcctgaatttaatacaatctacgatatttgttaagccctcaccaactatttgaccaaactatgacagttacatcccacggaactgtataccaaatggtaccccagcagttcagagagttaacacaccaccaattcacttccaggttgggctttaagattttcagaggatcttgcttatgaaatcatattggcttttagataaatgtattaaaattactgaaaacaaatgataacaccacagtaccacaacctaaacaatcctttctataaattaatttaaaacaagaaacaacaagctttaaatgtcatcatctctgcttattgtatgtccttaaaaatattattaaatgtccaacttttatttttctagaagaggtcattatatagcattgatttgccagcagggttctatttgaacataccaagagacctagacattgctcagaaacagtagtctcaaaataaacaagggattggaggaaaagatgagagatctccagtatgtctgcatataagggctgaaaaagtaaaagtttccaattgtttttttttctttgcaagtgctcatgcagggattcagaacatgcattcctcacccaacataaatgaaataattggcaagtagtcaaagaagaccatatccttgagtgggtagtattgttgtctatttggaaagcatttacatgttttgatttcctgaaacaatgctgaaaatgtcctaatgcaggaagggagaattgaaaacaaccaccataaaatgcaattagatgttggtaaaagtgactcagaatagacgtaagttaaaactttctgacagggttttctagcactgggacagtattttttgaggaaattataaaatggtcttatttcaagatcttttaacaatctgatgaaatatttatggttctttaaatttgtattgttagtatcatactctgaattataaaacatttaaacattttagtttataatctttaacttctcactattatatttataaatgtgtatataatttgtgcatatgtagacattcatgaggaagatgaacatatatgttaattggcatctgctcatttaaaactaaagttgtatactttcattacagtaatacacgtcattcattaaattatcttgtggcttagctttacaaattcttaccgttacatgactttgggtgaatgacctcaccggtgtctatatcactcatgtgtaacatgagaggagtagattaaataaacgaaaagatttctttcaactccaaagctatgacaatgtattttcaagattgtgtacttcttagaacaggctcaataataatttttcacattatgaactttgcagtcaaagaataggttcttcttaacctaacaaatgactatcctttccacccaaagtataaacaggatcctgattaataaattgagttcaaagaatctctgccaagtatgcaaaatcactgcctctgtttgtcggacattcattgcctctaagaattgatggaattgaaaataacctcattttactgggacctcagagaattaattatttaaattttttgctgctttaaacattaattttcttaatttacccatatatgttgctgataagagctgtaatattttgaatggttgtgctttgaagaaatctgaatccttttgctttgtattccaatgacagcagctttgaccagcgaccagctctcttctgaaaactaccattttgacccctgcatttcacctgttgtcccaccaagcctgtctgtttttccattaacagagacctctgaattgttgtgccaaatgtggacagtgttgtttcttcctcactttcctgaattataaccagttccaggcggtaacatgcaaccgaactttactgagtcctggacataatgggaaaaaatcatagtgtagaaagaaaactataggactgaatataaaaaaataatcatttctggcattacaggacaaacccagtcctttctgcttagttactgacctaccccctgttgctttgcttatcttcccacagtgaaatgtctttcttcttatatcctacatggtttccaggccctttactccaggaaagccaggagaaacgccttattccaagttcaagtaaacataataatttacaaagatacaactctgcccacaacaaaaaactccttttacagcgttatgcaaaggcatttagactggaacatctatgttccagacacagaccttaaccagtcttttgtcaaactaaaagagcaatctttcctcaaagctggaataacaccttttcttttaaaataacatttcgtgtctcacactcccagatgttttcatttaagactttagaaaatactgggatcagttatcagccaagagtacccccattctaataaaaatatttaaagacatggaaaaatcaatgaatccaaacaatcatcatcctcaccaaacccttatcatttctataactcacagtaaataatctcaagttctttattttggtaaattaagaaattccagagtaaactctctagcttctgatttaagctcagagatgcagagagcttcagagtgtcgttctcattcttaccataaggaaaaatctatacaaactacctattcattaatttaaaaaaaagcaccagcaaatttaggtcgtagggcaaccaaacaactccaaatctggaaagagacaggcacctgcaagaagaaagaggatggcatcatttgtttttccttgggtagacaccaccagatgtcatgtaaaccagcaagatgattcagctaaacattttaatgaattgctaaggctgagtatgggctagcatgaaaatgtgacacactggaggtggcagatatagggagtgcatcctatagcaggcttttcctccacaaaccccaccaggcactcacaggaaagactggggagaacagcagccaccttcaaacccacaaccatttcccagtggaacaaaagagttaattggcaaagagaatagcaaaaatcattgtcttagggaactggaggaaacccattggtgatggtggcagtaggaagaatgatcgtggtgaggggaagagaaaaaagtaatgctctatccccaggggtggggtatggaatatatgctaggatttgcacaacaattggagaaagttgcaggagcacttgtgaaggccacattgctgatacagaggtacacattacctacctaagactgagtcttaatcagaacatcaaggaatgcccttcctccctggcctgctaccaacagcctaacaagtgttgagtaaaaataatatgggaatatggttgaatatggaagaaattcaagagacacattctctttagggcccagcattaagggaagacccaaagctaaagggggagcaaatattaagaaaataacaactggcaagccatttcacaatctattcctctttaagaatccaaaagtatctatctcagtatctactgtcctacacaagatatccggctttcagcaaaatattatgaccatatgaaaaggcaagagaaagcactccgaagagataatacacataaacatgtgatatatgggacacatataaaaattatcacacaaggaatttaaagtaactatgattaatattttaaaggttctaaaggaaaaggttgaccacatgtgagatcagataggtaatttcagaggagatatggaaactaagaaaaatcaaatggaaatgctagaaattaaaaacatagtcaaagagattaaaaaatgtctttgggcttgttagtagacgtgagacagctaaggaaataatcactggacttgaaaataagtcagtagaaattacccaaacagaaaaaagagtggaaataaaagggagaaagaaagaacataacagagcatccaagaactctggtacaatattaagtggcatgacatatccataattgaaatgacagaaggagaggaaagagaaaaagaggcagaagaaatgtttgaagaaaaaaatcgctgaaaaaatttccaaaattgatgatggacaccaaatcacagactcaaaatctccaagtatatcaagcaagatatataccaaaataaacacacacgtgcagagtcatgttatattgaaattgctaaaaatcaacaacatagagaaaaccttaaaggcaaccagagggagggaatgataaattacctaaagagaagtaaggataagaattacagcaaatttctcctcagaaatgttgtgagcaagaagaaaaaggaatgacatctttaaagtattgaaagaaaaacaaaacccagtaacccagaattctatgcccaataataatacagttaaaacaggaatttaaatttttctgactgaactttttaggttcctattctgtctgatgtccccaaagtaatatgcacctatatcctcattttattttgtctttcctttttcaaatctgagagggtaaagctgtttcttctattcaagaccaacacctctattgcctcagagggttagtcaattgcctcctccctctataggctcaattgcaatttagctaatctctcttctatttctcctttttaccttagtttatgaactagaccatccagtcctttctgtcactcccgtccatgtatatctcttttgacaattctagtatttatatttttctttctagtagttattgctatttccttctgagactgcatgttccttaaacaatgctgttccccaagattcagtcattggcccatgtaatattttaaggtatgaagacacctgaaagatcataagatatctcctttcatgtcttaactatcttctatttgattatctctcaatttccatatttagttcccatttctacttttagtcacagaactctaaccaagtgcttgctggacattcataacatctacacaacatttcccaaactagatgcatccattattcttcctcatctttaaacatactgctacatatcctaaatattttctattatatttactgcctcagctatccagttgcctaaggcagagccctgggaaccttcctcagctccagactcatcatccctcccaacatctaaacaagcaacaagtgttactgcatgtatttgtgggcacatatttctgagtcctcatctcagcttgacttccctttccaccaatgccctggggatcaccttattttttctccccaagatggttctcattaaaatataccacagtagtgataagtagtaaaattatatatggaagctgctgactgttgctccattagctgtttctgtggcaactctattttttcctattaatagtgtactaagtgttttgaatctatgtcttttcacaacttcttttgattacagtttaagatagcctttaaatactaaattcatattaaggtggatctgattgtgtgtgtgtgtgtgtgtaatttctgttacagccatcattcataattcattatttgtgaggaataattatagcaaagactgattagatgaaatgttagattatttattataccagattcgaatggaattaaagtctaatatatgtgttaatgtgactaataagaataacaataataatttagaattgcaaaatgcttttaagtttccatatactattacaacattttcttgtttttttcctttataaaaacttacaggtaggaaaggcagttatatttatcctcattttatgagccttagacagattaggtgagttagccaagatgcacaactagtaatggtgaatcctagatatacttcagttcttctgattccaaattccttactttggacactaaaccttggagccacacaaatgtaactgtaggcatcacttatgtactaatgtacctgttacaccatgtgcctactggagagaaactgtaacatatttatagtcaattatctatatttatagctatcctcacagttggataacaatgttatattgtaaactctagatacttttgcactctatgacagaaagtggattttttgtttaggaagacattttaattatgaatggaggcttgttggggatccctattagcctttgttaaatcacaaggaaggtaaactcttttgcataataaagtattaggatttttaaacttgtcccctgactgctcaagagatgaagtttggggagcggcagtactttggaggactctggtaagtgaatagatataagaaagttctgcagggatagagccacatggcagcagacagggcttaggaagagggactaccaattgtccctgtagcaaagatggcctggttaaagcctctttagaatgaatgagttctagtaaccagttttaaagatttgtctgtttcttttctcccctcaaccctttctttaaactttctgtaatcacaacagcattgtaacaattttgcctcaagctgggaagagaagggctgtgttcctcctagagacaaaacagggaagaaaggtagcaggggcagagtgaaagcaatgattgctgtggaattggaacaactgtgcagaggaagctgtgacaaataattagggttggtgaagcacctgtccctttggaggtatttcccagaaatactgggaagggctctaaatgtcccattgttatgtggggagatggttttgtttattgtattgcccacagaagtctgaatacgttcaaatattttgcatatttgtgtgtgtgtgtgtgtgtgtgtgtgtgtgtgtgtattgaagtacttggcataaggttatgctatttcaaattaacttataaagtaatttggttgatgcaatattctgtgatcaaaatttattgaggacctcaccaaatgccaacatgtgtgtgtatatatatatattatattatatatataatataatatatatatattcactcatttagttctcaaaactattctatgacactaatattttatgtaacttttctatgatacgattattattcctattttttggataaacaaactaaagtacacaaaggagccaatacttacgtctaaaatacctaaaacatacatatttgaaataagagaatatgaggaaaaagtctcaaaattttatgtaggttttaataataaaattgaaaagtcgaatcattttaaaaccttaaagttagtatatggaaatatttggctcaagagtgaactttagacctcttgtctggatatgagtatggaatacattattcagtttcttttttataactttaaatagcttgtaagaagacacctatgcaaatagcaatttctccaagataagtggccatacaggccttatgaccttttgaacatgtcttcccaaatacttcatttctgattagaggatggtcattcagatttcactggatttaaatccacagtgggataggttttaatcctttctggaaaaaatatttataaagcctatgtgagtttcagaatagtaagagcttttattctgtctctccttggatgtgttaacccttccttctacctcagatccatgcatttctctaagttttatactttgtttaaattgagctttcattgtttctatgaccaattttcaatttgtctctactttgcacttcagtagaactaagatgaattctgaaaacgcacaacagccttcatcaatggtccctttctgtaaagagtatctctccccgtacatattcagaacagtataattttaggaatcaactgtatctacctagaaatatgttttatttctctctgtctccaaaaacaattgaaattctctcatatggtttattgccttgcatttacaaaggagccacaaagttcgatttgtgtatactatttttgcttaactagctatctggctgatgtgcacatcaacaaatgacaatgtagtcattccatctttggtacatggagtattatttgataaaaattccactatattttaacttctgaaagtaaggtgattttgaagtatctagaagatagtttctttatttcaacaatcataaccctgtgctgccagatacatattttgatcccaaacttgaaaatatttcaatggttagattattatgcttttcatctgacagattttatggtttaccattttcacttaagctttcccagctttttctcctctttaaaagtaaactattggaagtttcatcatttccattatcaatactagaaattaaagagtcagagatatatgtattctcagaattgtctgaagagtttattgtaatttaataagatgttctcttctgttgtttcatctattatgtcattacatatcatctatgtcattatcgtgtttctcttcatgatttttctggatcactttaatgctctaatcaagtgctctttattttgtgtacagaggcctcattatgataatactatataaaacatttgtatgatgcttttcagtttacaaagtcctcttaaaaaacattaccttatttgcaactcataacaaccttgtacattaggctgtgttattattattattatctgtagacaagaaaacacttttatcaggtaatggagaggcatttaaatggaagattttcaaatccttacctgagatctgttcactcttttccttcttttttagtttgttcccttttactctgtatccttggaattatgtagatctatagtgaaaggctagcctatcagttgctagccattactttaccaagctgagccttatttgactcatcccaagtaatataggtgataatgactacatcataggattgttatgaaaactaagtgagacaaagcacgttaaagtgtctaacacagtaccattttatccatccatatgccatatggtggcataatattctaggttggctattccttaatgctatgtaaattttctttcttctgaaattaaaataattataatacttaatccaaattagactctaaaaaggtcatggtcagtataatttatgaggtaaaaatggcatcaaaaaagaaagaaaaatgcagagtacagagtaaaaactgagccattttctgggaactgttgtgaaattgagtttcttaggcttttcatgtcgataatgcaaactaaatataatttgcaggtccacaaaaagtaaaatgatataaaattatgctaaaatcaagaagaatggaaattaatggatttaaaaaattattgttattgcattctctcaattttttaagactctgtctctgcagtaataaagggaacagagggaaaagtgggattccaaaatagtttatttagacttggaatgcttgcatgcttatatctcactcaacatgaatacgtcttaactaatggggacttaatgaaaactttatattattattaattgattgtggattaataaatgaattaaaaatggggttagaaatagtgcgttatttcttcatctcttgcctttattcagcttttctctttgtccattctacagtaggaatgaattctatctcatagatagatttagaaaccaactccagcaaaaaaattgttgtgctctttgtgagggaagaggttagattaggatgaattaaatatttcagttgaaaaaaatctgagcaaattcatttaagatattttgaaaactcctaaacagtatataaatatatgaaagtttaaacaataataaacagtggaggtacatcttttgtgttgtaaaaaatgtagttgatctttttctttaatgtttccttatttttgtgttttgcttagtgaggcttttctactgcaagattatggataattttgcccatgtttttgaacattcttatggtttttctcttttcccctaaccttgacaaacaaacttcctttcaaatgtcctagatgcttcagggatagctatttgaaatagttcttggagattaataattctccatggcaagctgtcttatccgtattctggtaggttatcttatagaagaggaaaagaaggcaaaatcctagagttaaaaaatacaataaacaaaatgaaaaaagtagtaataacaagtacaacaacaagagctctagtggtatactgagaaacaactgcattcttttgttcttttttcttattttcaatcattatgttgcatgaggtacagccatatgaataaatatgtactaacacatacctagacatacacaatcagccctcatattcatgatttctgcatctgtggtttcagtcaattgcaaatctaaaatacttttttaatcatctgtagtaagcatgtagagactttccttgtcattatttcctaaaaaaatacagtgtaactatttacatagtatttacattgtattagataatgtaagtaatcttgaggtggtttaaagtacacaagaggatgtgcgtaggttacatgcaaatactatgccattttgtatcagggacatgagcatccgtggtattcactggaagttgtgaaaccaatctcccacggataccaagggacaactatatacatatatgtggctatgcggcctacctactcagaagagggttcacagaagaaggggcagcatggagagattcataatgtcttgtgagggagaggggagcctacagtggaatggttagttagaaaatagccaataacttatttccagtgaggaattagaaaacagggattatggaattggaaaaactgaggcattaaaagtcttcctcctgaaattactatgccaagtggaaaatctgctctgaacccctatccaggaaaacattcttcttcaaaagatgttacttttaactttgataagtcttgattagctcttttgggttttagctgttctttcactatgtccacactttacttatcaatattaataaatcttgttatagccagagtggtttgcaacctaaagtagaaaatatctatatctcagggctttgtacctgattgcacaggtagcaatcccaggctaagagtaccccttaatgctgcaatggccacagtagtcttggacagggggatcatgccagtaggtctgcccagaatctctggatagatttattgttgaagaccattcctagacaaatccattctgtaaagactggaataagtatttacttctttagatgtgcagatattgatacatgtcctcaaacatcagatataatcagggaaacatgatgacaccaaatggacagaataaagcaccagtgattgaccttaaagagatggagatgcatgaacttcctgacagagaattcaaaataactgtttgagaaagctcagtgaatgttgagaaaagacagataaacaatttcttttaaaaaaggagaacattaagtgacccacaatgagaaacagaaaaattgaaataacaatttttaaaattaaacagaaatcctagagctaaaatatacaatgaacaaaatgaaaatgaaatagcatcaacagcagacttgatcaagcagaaaaagaatctgtaaacttaaacacagggttatttgaaaatacacagttcaggccgaggcgggcggatcacgaggtcaggagatcgagaccatcctggctaacacggtgaaaccccgtctctactaaaaatacaaaaaattagccgggcgaggtggcgggcgcctgtagtcccagctactcgggaggctgaggcaggagaatggcgtgaaccccagggggcggagcctgcagtgagccgagattgctccactgcactccagcctgggcgacagcgagactccgtctcaaaaaaaaaaaaaaaaaaaaagaaaatacacagttcaaggagaggaaagaatgaaaggaaggaagaaagcatatgagatttatgtgacagcatcaaaaaacaaatgtttgagtcattggtgtcaagaagaagaaaaaaacaaaggagtagaaagtttgtttgaagaaataaaatcagaaaactttccaaatctggagaaagaaataagtattcaggtcaggaaggtcaaagatttccaatcagattcagttaaaataagactattcaatacatattacgataaaattctcaaaaatcaaagacaaagagagggtcctgaaagcaacaagagaaaataagcatacaacacataagggcattttaatatgtctatcagcaaacttctcagcagaaaccttacagatcaggagggacttggtgatatattaaaagtgctgaaggaaaaaaaaaatgccagccaagaatgctatacacagaaaagccatcttttagaaataaatactttcccagaaaatcaaaagctgaagaagtttatcattgccagacctgtgttaaaaaaaatgcttaatggagttcttcaagctggaataaaagaatgctaataatacaaaaacatgtgttaatgctagtaacacaaaacatctataaatataaaactcattggtaaaagtacatagtcaaatttagaatactctaatattgtaatggtggtgtttaaatcacttatatctttagaagaaaggttaaaagactaaattagtaaaaataataactacaataatttgttacaggacatgcagtataataagatgtaaattgtgacaccaaaattcaaaatgtgtttgggagaatgaggtaaaagtttagagttttttaatttttattttgcaatccatgttaagttgttatcagcttaaaataacctgttaaaagtaaaagtgtcttttataagcctcatgataactacaatggaaaaataacttgttaaaattatggaaacctcgtctctactaagaatacaaaaaattagacaggcgtggtggcgggcgcctgtagtcccagctactcagaaggctgaggcaggagaatggcgtgaacccagaaggtggagcttgcagggagctgagatcgtgccactgcactccagcctgggcgacagagcaagactcagtctcaaataaataaataaataaattttataaagtgttttttataagcctcatggtaactacaaaggaagaccctattattggtacacacaacacaaaatgcaaggaatcagaatacactactagagaaaatcacttaaccacaaagaagggcagtaagagagaaataaacaaagactctacaaaacaactagaaaacagtgaacaaaatagcagtagtaagttcttacccataaataagccctgaatgtaaatggattaaattctgcaatcaaaagacagaaaaatagatttaaaaaaaagacccaatcatattctgccctcaagggacccacttcacctgtaagtacacacatagatcaaaggttaaatgttattatattatatataattatctataatataaaaacatatttatatataataatgttatacagatataaaattgaacacacaaataaatagaaagatatttcatgttcatggattcaaataatcaatactgttaaaatttccataataccccaaatgatctacagtttcagtgcaatccctaccaaaatattaatgacatcctgcatagaagtaaagaaattttaaaattaatattagaattataaaaaacctgaatagccaaagtattattgagcagaaagcacaaagctggaggcatcacactacctgacttcaaaatactctacaaagctaaattagcctaagcagcgtgatatcagcataaaaacaaacaaacagatagaccaatggaacagaatacagagcctggaaataaattcacacatttgtagccaactgagttttgtcaaaagtgccaagaacacacaatggtgaaagggcagtccatgtttattgcagcactatttttatgatagccaagatatggaatcacctcaatcatccatgcaacaacatggatgaacctggagaacctcatgttaggttaaataagccaggcacaaaaagagaaacactgtatgaccacactcatatagaatctaaaatcattgatctcatagaaataaagaagtaaatggtagagaggctagacaggttgggggagggggcttggacaaatggtcaaaggatacaaaattttagataggaggaataaattcaagagatttatttctgagcatggtgactacagttaatggcaatatattgtattattgagaaatgctaggaaagcgggtattaaatgctctcccacaaagcgataactatgtaagttgatgcatatgttaattagctagatttaactattccacaatgtagaatacttcaaaacatcattttgtatttgataaatgcatacttaattgacagaatgtcaattaagaaacaaaacaaaaccagctcatgtcctcctgcaatgatttaggaatcccagaataattaatagagccaaaatttccatcacattttccttgactgccagttccatgttggctatatcattctgtgagcaagttttcattttttaacatttagtatgtttactcagtaatcaacatatttgcttataagtagtgacacagatattcagccgcatatatttttctaaactggtatcctcttgtttctgcaccatttattgaaaaaatccatctttttttctagaagtatgagtttttgattgcttaaatagaatggaaggagaaaaggaaaataattaactttcagatttcactaggttttgggtttttgcaacataaggagtattccacttagacttctggaaaatttctatttttaatccaggtttatttgttgaccagtgcctttgaatagttttcccgttagttgtaaataaaggatttctttactctgtgtccttggttttcctctttacctgatatttagaattattattgataatttagtaataattttatcattaatatcccaatctattgcttgatttgtcatcatattgagagtttgagaagaatttatttttattaaattattttccttaaaaacaaagtgttataaaagagagggttaatagaacaaaatgaagaataaatagctattaagaggctaagtggtattaaagacagctctgtggcattttgaggttaacatatttaaatgatacattcattcctagacagatagatcagcatttaccagatggtttctgctagaatgctctcctctccaatatcatcatctcatttgtggtgtgtacagatttccagaaagtcaatggggatgtcctggggctagtgggccaggcttcttcttttcatttgtattcaaagccaatattttctttccaaatcttgcccctttcttgtttaactcaaggcttggcgtggtaggggaggttgggaatggtgagaaatagtgcctccttgaatgaaaggttggaggaaataagtttacagacttggcagtgctagttaagggcacaccccataaagaagtctcaatatggttaactagtttccagagcagtgctacaactgagccttgtgcatccctgaagtgatgagcacaagtatgataatcatcggaagagaacatatattgtataatttggaatcagccagttatttgtcagactacctttgctgtctgtaggatcagacacacatgtgcctctgcatttgggtaaatgtaaaaccacatttcctattataaagaggaaagactgctggaaacagctgctctggaaaccaagttgctcagaggaagtgagctaaacttgtgtttagctaaatggtgtgtagctaaacctacccagtgaaaaaaatatgtagaaatggactcaataactttctcaagagatgaaaatatagagtaataaataggcaagaaaatagggatagaaatggaaaaagtggagagagaataacaatgggaaagggaaagaggaaacacgcttatgtgttgtagtgactgaccaacgcagtttatgaaacaacatagctagctcaggagttagcccaggctttcaattaaaaagagatgcataagcccatatacctctttttctttccctcaaaatgaccttgagttttagtttggtagggttttggtacagctgttatttgataatatcacattgtgcttttcaattaacttagattgtttaaaaaacagataactgaaaaccatctgtttgtggttctgtgtaatttgttctcaggacagggactaggaatgaaccattttaaattctgctaatgaaacctctcattaatttaaggagttctacaaactaagtctgtggtaccaggtagaaggggtgccaagtgttgggctttctgggataagggaaaattaatttcttcctttgccatttgtggttgggtagcatcttttttttttcttcctggcagcgagtctcataatttaatatgcattaacataatcaggaatgattgcttaaaatacatgttcttgaagtttatcccaagagatttttgattcagtatctctgggaagggctccaggaattgccacagttaaacaagctccccaggtcattctgatgtagatggtctgaaggccacactgactaatgctgccttttagaattgggaggtaagtttggattttgtagatcaaatattactaccaagaataaaagaaatacacaaaacctccaaacaactcaaatgatgtaacaacaaagcaaatggctcaaagcaaacaaaacccaacaaaaggttttaaataggtccttagagatacaatgtaatttgtctcagctgcggagacttaaagaggccaactcttagttgacatggaagaatagggacaacattgccaagaaacatggttaatttcagttatggataccaaaccctgggctctggaaagcattaacaattttacccactatgctaatcttccatatatggggcatgctggataaatctattttgctaacgtctcttttacaataatgtacttaattttgttgggtatatattctaatttgtgttttctaattcaagttctaacttttaaagaggcccccacccccactgttttccctcgagcttattaaagggcataatatcactttcctcttgttaagagtaaagattggaagaatttagttatcagaaaatggtggtaggttgatgcttttggtggtggacgcagcagtctgatgaataagcatctttcttgaagaccagggttctgccactaaagatgtatgtgatttctagaaaaataattttacctcattgcatctcagttttctcctttgtaaaatagggatagtggtaagtgaatgatttctgtgatcctctctaatgctaaatagaatgagaatgtgcgaagcctttgttatctcagtaaactttaccacaattcatctgtaacgacaaaatgttattattagaaacatattaaaaagcttgcaagtggcatgaattcaggcactgtaaatgagtgtagtgcagtactgtgaaggtgaggggaaaatatgcatgtttcaatcatagggctacaagtttgcacagatctgaaaaattactgttgggtttcttcaactaggggatccagaatatcactgttattcatacctcttgccattaggtggggcagttgaagagtaggaagaccgttttcaagtgaaatgttgttttgcttgagtatgttgtttcatactcaacaacatctgaaagtaagtggtaaaatagacttccttttatatagtctaaactctcagtggccagattattagtttctttattaattctggatggtgaggaagaagggggacatgggtgataaagttaatgtaatgtaatattgcagattgtattattaatgtaaattcccatttggaactcaaaagccaaaatggatctgaagtcaacttatgcagtctactttttcagaagaacaattaaatagtatgaggtagagacaacaaaataccaggtttatggaacactagaaagtggaaaggagccatgagagttattgcggcccttctctcagtgtctattgatttcctttagcatctggggtacttaactatttccttctccttctactttcttttagaaaattctatgtcaattaatttatctgacatcttaatcgataattcattaagaaaatcttttgtgcccagcacatcatgatgaattttgatggctaatgttacctggtctctgttttgaagtgtttttattgacttataaatttaagatgttttcctagaattaaaaaaatgacatggaaaaacttcaaatcagtcttttataaggtagtgactttaaattttcatttgtcaatttccacatttaggacaaaaagtaagagatgtggagaggaagacaggaatactagggaaaaggtgagagaagaagtatttctggttacttctgttgtatattcttaaaagtaagagtccatagaaccatgatagtcaaagtactgaggaaacagcagatttggaaatttacatttcatatcaaagggattttctgtgagacaaaccaatgagatttgatagattagaaaggaaggactaataaagaaagcaactgaataaatacttgaataataaatgatatgtgtttttcacactctggtccagttatttttttttctcttttaaaaaaaattttgttagtgtttttgtgtgagatagttaaaagttcctgcaatccacagagctctatatttgattaattctggattcccagcaagtttgcatggcttttcagaggactacaaaatagggaaaagactaaattcaatatagaattgacccatgaaaatcacgggagttagtggtaccaacccctgtgcagctgaaaatctgtgtgtaatgtttgacttctcccaaaagttaactactaatagcctactgttcaccaaagtcaattaacacataatttttatgtttttgtattatataccgtattcttacaataaagtaagctagagaaaagaaaatgttattaagaaaatcataagaaagtgaaaatagatatttaccattcattaagtggaaatggatcatcataaaggccttcatcctcttcatcttcatgttgagtaggctgaggaggagaaagaagaggtcaggttgatcttgctgtctcaggggtggcagaggcagaagaaaatctgcatgtaagttggcctgtgcagttcaagcccatgttgtttaaggatcaactgtaaatcttttaacttttcaaatgacgctcattcacacaaagaaatttggaagtagacaggatttatatgcagctataattttaaatggcagccaacatcatgaacaaattctcctgacatctcattccttgatttctaagaagtcaatgcaagaggaaggtgagaatcaaatttgggcagctttgctcagctgaatattatatggtgatgattatgttaataattaaaatattgaaatatttatttagtacagtcattcaccatgtaacattttggtcagtgatggatggcctaccatggtagtttcataagattataatagagctgaaaaattcctattgtcagctctactgatatcacagccatcataaagttgtagcataacatattactcatatgtttatggtgatgcaggtgcaaacaaactcactgcatggccggtgatataaaaggatagtacatacagttatgtacagtacataatacttgatgacaagaattactgataataagtgttactgttaagtacttaatataatagattacgtccctgatttatgtatttactatactatactttttaatcattgttttagtgtgtactcctacttacaaaaaaaaaagttaaccataaaacaacttcaggaatgagtttcttgaggaggtgttccagaagaaggcattgctatcatagaagatgacagctccatgtgtgttattgcccctaaagaccttccagtgggacaagatgtggaggtagaagacagtgatgttgatgatccttatcctgtgtaggcctaggctaatgtatgggtttctgtcttagtttttaacaaaaaagtttaaaaagttaattttaaaaagctagaaaaaacttacagaataaggatataaagaaagaaaatattcttctacagttgtaaaatatgttggtgttttaagctgagcattattacaaaaagtcaaaaagcttaaagaaattaaaacgtttataaaataaacatgttacaataaactaaggttattattgaagaaagaaaatgtaaaaaataaatttagcacagcttggcctggcgcggtggctcacgcctgtaatcccagcactttgggaggccgaggcgggcggatcacgaggtcaggagatccagaccattctggctagcacggtgaaaccccgtctctactaaaaatatatatttaaaaaaattagccaggagtggtggcgggggcctgtggtcccagctgctctgaaggctgaggcaggagaatggcgtgaacccaggaggcggagcttgcagtgagccgagattgcgccactgcactccagcctgggcgacagggcgagactttgtctcaaaaaaataaataaaaaataaataaatttagcatagcttaagagtacagtgtttataaagtctacattagtagacagcaatgtcccaggcatactcaccactcactcattgactcacccagagcaacttccaatcttgtagcctccattcacggtaggtgttttctacaggtatatttttatcttttaccacatttttactgtatctttcctattttttatatgtttagatacacaaatacttaccattgtgttatgcttgcctgcagtattcagtacagtaacatggcatacaggtttatagcctaggagaaacaggctatacaatatagtctaggtgtgtgtgtgttaggctataccatctaggtttgtgtaggtatactctgtgatgttgacacaacaacgtaatcacttatgatggatatcttagaacatattttaattattaagtgacacatgactgtacttaatatgtattaggtaccaagctaagcatgcaattaactcatgcaatcctcacaataaccttatgaatttagtactatcaattagcaccatttttttccatgggaaataggatataggatattctatcacaagcataccctcaatgctagaggaaagaaagaaagagacgaagagggtgagaaagagagggaaggaaggaaggaaggaaggaaggaaggaagggaaagaaagggaaaggaaaagaaaaaagaaaaaagaaaagaaaagaatggttcattttctgtttgtatttaaataatatcacattattatttattgggaaaagctaactgagttgggagcagtgatgtaggttcgtaccaccattagttgaaatcattgcactatctgagaagaaagaccatgaaatctaggaagtttaagaagttagttttcgttagatccaaatactgttaatgttggctatcttttttggatcacaatttaagagaacagattcctttaaatgaattggttgaggaaatgaacagaatatttacaaatatttctccttaagtgatatttcattagggagaggtcttccttaatgcctgtctgaaatagcaccctcctcattctctaaatcttcacctgctttattttctctttgtagaacttaccacctgacacatttcacagtagtttgtttgtagactgtcttccctctctagcttcataggtacagggaatttctctgctctgttcactgataattttcttgtacctagaacactgcatggtacttagtagatgttcaataaatatttgaatgaatgaatgtataagtaaaataagaaaattcatgtggccaataggtaatttaaaatattctgctttgctaaaaaccaacagaagtaaaaataggtaaaagcaattagtattttcatctaccaacaatgatttaaacatattcaaaaagatatatacccaatgctcatgaaggtgaagcaaaacaaacattcttacaaaattgaaaaacactttgctggaaagtactttgtgaatatggtgtctttaaaaatgtttctatactatattttaattctattaatatattcaggaaagcaatccataattaaaaaatatcttttgctgcacaaaagtctttgcttcaacagtatttattgtagtgaaagaagttcaaaaaattctaagttccaaaggtaggggcacagttaaatgaattatgacaactctctttcatggtatattatataagcatcatgagttaggtttactaagagcttttttaatatgaaaaaaatgctaatgaaataaatttaatttgaaaaacagcataaacattggaataaatgacatcttaaaagcatacatagaaaaaatggtagaaattgtgccaaaatattaacagaaactagggcaggtaagattatgggtgattttgttttatacttctctatacttttatttttcaagtgttccagaatgaaacttttataatgaaaaaaagttttaaatattttaactgattttgtattatactagtgataatccagaagtgattatgttttatacaatagactatggctttatatgaagaaatgaatatagtctagtattgtttttattatctaggaatatacatgtaactgaagaatttatgagtaaagtttaatataagcaagtaactgggacttctggaggaaagctcactctaggggaagctctcaaatgtgttttcaatcttggattccagtcaaaaaaagacatgagttacttggatttaataaccagatatacattctcctcctttaggactagtgaaaaatgggcactgagtgagcttgggcacagactaataaaggatattcaaacacgataaacaaacagtagcgaggcccgagctacctgggcttagaaggcagcagggcccccagaaagtggtagtagcaacaattactgtggttttatcctgtggctagcccaggttccagacagaaagttcttcctggcctcttaccctagtaactctgaggactgtacccttgattcttggattgttagacacatttccacttctggctttggccctgcaaccctggtacctaaattgagcagcttgagcacacaagttcctcattctttcattatgtatgtccttgttaagagactgtgaaacatccagaatactagggcagcaagccaaagcacagcctctaataacaaggctttccattaatttgattcatttaatgaaaagctatgtgaactattgtaataggttcaagaacacaccttaattcttggactgttttttagacctttagaagtcgaaggcctctgaaattatatgagcttgggtgttgagatagaggaaacatgaaaatttattctacctgaacctctgcagttataaactagcatcgtataatttatttatttattaagtcaaggtttataagtcatttccacaaagcctagcacacagtgtctagcatatatagtagatgcttgataaatatctgtcaagtgaatttcaaatacttaaattttgttgttaatacattcatgtaatggagccatatcatctcatatgaatgattgaagaatacaaaaactccagacttgaatgcagaatatataaagaactagtacaaatcaataagaatgagacacacatcccattaggaaaatgagcaaaagacttaaacaagaagcccttcaccaaagaagaaatccaaatagtcaataagcatataaaaaggggctcaatctaatcattgaggaaaaccaaacccataattcaatacaagtacacaccacaaaaattgctacaataaaaaaagatagacaatgcctagtgttggcaagaatgtggagcaaccagaaccctcaatcacttcctgtgatagtgtgtattggtaattggcttgaaaaactctttggcagtatctactaaagctgaacaaatgcataacctatgacccagtaattctagtcctagatgtatctcaaacagaattgcatgcaacttttcataaaagactatacaagagtgtttcatggtaacaccagtattaacagacaaaagctggaaagtacccaatgcccatcaaagaaagaaccaactaataaattgtaatatattcacaagaacctaagaatacaactctaatactaatcagctgtgagaatgaatggatagcatgtagttgcaactacattttaaaagattaattaatctctcaacataaggttgccaggcacaaaagaatgcatactatatgattccatttaaacaaagtgcaaaaacaggcaaaagtattgttttggttttagaaatcaggatagttgttacccttatggagtaggagagctactgcctagaagagggcacataggggacttctgggtgctgataatatgctgctttttgatcagggtgctgcttatgtggtgtactctttataaaaatgtattgatgtttacacttacgtgcaatttttgtatacatattattcttcaataagaagttaatagggccgggtgcagtggcttatgcctgtaatcccagcactttggggggctgaggcggatggatcataaggtcaggagttccagaccagcctggccaagatggtgcaaccccgtctctactaaaaatacaaaattagccaggtgtggtggcagacacctgtaatcccagctactcaggaggctgaggcaggagaattgcttgaacctgggagacagagttctcagtgagccaagatggtgccactgcactccagcctgggcaagagactgagactctgtctcaaaaaaaaaaagaagttaatagaattttttcattcttttcaattaacttaccaaatcctggtattgagcttaccatgtgatacatataaatgcaaccccagaatatctcctgatatgatctcatgatgccatgggaagcagtaagtctttttgaaaaaaagcactgtttcacttattaaaatgccaaatacattttaccagaatttattattgaaacaaatcttagtgttatttttgacctgctgtaatgcttttgcttgtttttttattatggtaagaacatttaaattgagatctacaatcttaaaataatttaagtagacaatacagtattgtaaagtacaggcacaatattgtattgacaatctctaggacttattcgtcttacataactgaaacttcatacttatctaacagcaatccctcatttccccctcctcagaccctggcaaccactgttttactctgtttctctgagtttaactattttaatttcttatcaagtggaatcatgccatgtttttttccctgtaactagcttatttcacttagcataatgtcctctaggttcaaacgtgttgttgcatatggcaggattaacttctttttaaaggctgaatagtatacacacaaccactacattttctttatccattcacctatcaatgaacatgtagtttgatactatatcttggctattgcgaataatgcttcaaagaacatggaatgcaaatatctcttcaacatacagattttatttcctttggatatatgccccgaagtagaaattccagatcatatggtagttctatttttaattttttgaggaagcttcatacagttttccataatgactgtcctaatttacatttccaccaacagtgtacaagtgttctctttcctttacatccttactaacacttcttttcttttgtctttttgataacagctattctaatagatgtgaggtgatattgtggttttgatttgcatttccctgatgattagtgatgttgaacattttttatctacatgttagccatttgcatgtcttcttttgagaaatgtctattcaaatcctttgtcaatattttaatagggttatgtgttttcttgatactgagttgtttgggttccaaatatattttggataccaaactcttatcagatgtatggtttgcaaatactttctcctattccatgggttgccttttcactgtgttgtttccttcgcttcctggttgcattttagtttgatgtagtcccacttgtctagtttcacttttgttgtttgtgcttttgatgtcatatccaagaaattattgtcaagactaagaaaaaagagagaaaactcaaataaataaaatcacaaatgaaagagatggtacaattgatgctacagaaatcaaatggatcataagggactactataaataattatacaccaacaaattggataacccagaagaaataaattcctagaaacacacaacctccaaagattgaatcaggaagaaatagaaaaccttaatagaccaataacaaatgagattgaaatcagtaataaaaaacctcccaacaaagaaaacccagaatcaggtggcctcattggtaaaaattttttctttttttttttttttttgagacagagtcttgctctgtcacccaggctggagtgcagtggtgcaatctcggctcactgcaagctctgcctcctgggttcacactattctcctgcctcagtctccagagtagctgggactacaggcgcctgccaccacgccaggctaattttttgtatttttagtagagatggggtttcaccatgttaggcaggatggtctcgatctcctgacctcgtgatctgcccgcttcagcctcccaaagtactgggattacaggcatgagccaccacacctggccccctcattggtaaattctaccaaacatttaaagaagaattaacaccaatccttcttaaactcttcccaaaaaatgaagaagagggaacacttccaaattcattttaaggccaatgttaccttgattctaaagccagaaaaagacactcaaagaaagaaaattactgataaatatttctgataaatatagatgcaaaactcctcaacaaaacactagaaaactgaattcaacagcgtactaaaaatactaaaaggatgatatactatgatcaagtgagatttatccctggaatgcaaagatggttcagcatgctcaaatcaattaatgtactacatcacattaatggtaggattaaaaataacatgatcatcttaatagatgcatcttaataaaagtttttgaaaaaattcaacaccttttcatgacaaaaactctaaaatacattaggtatagaaagaatttacctacatataatagaggccatatttttgacaagtctacagctaactgaatactcagtgatgaaaagctgaaagctttttctataaggtcttaatcaaggcaaggacatccatttttgccatttttgttcaacacagtaatggaagtcctaatcaaaggaattaggcaagaaaaagaagcaaaggcatccaaatcagaaagaaagaagtaaaactatttctcttggcagattacatgatcttatatgtagaaaaccctctttctacaaaaatctgttgaaacaagcaaattcagtaaacttgcagaatatgaaatcaacatgttaaactcacttttgtatctgtacactaacaatgaactatctgaaaaggaaattaagaaaaaaatttatctacaataacatcaaaaaatataatatttaggaataaacataaccaagaaggtgaaagactgaaaactatacaacgttaatgaaagaaattaaagaagatgcaaataaattgaaagacgttttgtgtttatggatgggaagacttaatactgttaaaatgtccatactacccaaagattcaatacaatccttatgaaaattcaaatggtagccaagtgtggtggctcacacctgtaatcccagcactttggaagactgaggcaggcagatcattttgggaacaaaatgtaaagttgcttctaaaagagatttatgaagttttttgtttactctatgtttaattatttgctgagtacacttatcacattgagatgggaatttgaacaagatctttgtacttgattagagggaataaaaacagcacacttatcaaataatcagtgtgttatcccataattcagcttgtggcttgctgaaagttgactcttgtgtaaaagattagttactttttattgttttaaggctagaaacataggttctatttttgtcaatgctactacatcccacaaagtgtctatatgagccatttccaaatttccatttatgataaggggctgtgatgcatgagtatacccacgtttttactgacatgtgtagagacaaactcatgagtttgcctagttaccttttattctgtattcacagatttccaaaccttcggggttaggccatactttcagggaagtgggtgagctttattattgaggccaagtcttctatctctgtttagatgcaaacctagtacttagggaccttgtcatatctattttctgcaaagtactttctgtacttgtcaagatcaataactggttttataatgacagaggacacagaatttagccttcagaacagaaatggctatttaccatgcgaaagtattttttttttctgacaccatcagaccagtgagcatagatttctctctgagagacactttttaaacacaaaaattacctatttatcttgttgcatagcagctctgtcaactaaacagtgcatttaataataatgataatacataaaaagtctagtatttcatggtttacaagatattttccacattaattgtcccattggaccccccaaaattctataaagtggtcatataatgtattatgccattttgtatggggtaactgatgaggtaacagaccagagactgagcctagtttgcccagctaagaactatcaaagccagtcttcccaactcagtccatgatctcttactattttacttcagccctgtaagattcatggttgtatttccttccatatagaactatggaataataattactaatttagaatattatatagtccattttgtacaaattgtctaatttgtatagtactatcctagtactagtatatataattctatatactagtcatatatactagtatatagaattatatatactatatgtatgtatatatacactaatatatataattatatacacatatgtattacatatatgtatatattatatatactagtatatatactatatataacatatgtatatataggattatatataaattatatactagtatatataatatgtacttgttatataattatatctacatatatacacatatatgtagtactatatctacatatactatatatctgtatatatatagtactagtatatataattatatatacatatatgtacacacatataggatgctatgagaatgcataggaagggaacatagtcctagagtatcataaactttcactctgtgtccaaagtctttcattaaatgataccagaacataggatctactgaaattctaaatggccagttggaagaggaaggtcatgtttggggaacttggttaaaaattacctttagtggaaaagaaagataataactcagtaaaagtagctagtaggctggagcagagtgtctatgtttgctatggtttgagtgtatctcccaaaattcctgtattagaaacttaatccccaatgtagcagtgctgatagagtggaacttttaagaggtaattaggtcataagagttcttccatcatgaatagattaatgctgttatcatgagagtgggttagctattgcaagagtggctttggcataaaagcaagctctctctatttcatgtgctctcaccgtatgatgctttctgccgtgcctttgtcaggtgctgataccatgctcttggccttcacagcctccagaaccataagctaaataaacttcttttctttgtaagttactcaacctatagtattctgttatagcaacagaaagtggactaagacagtggtttaacgtctggatttcaaaatgaaaacctgaaaaagaaagaatgggaagaggtcttacaaaaatatcaaattaggctcaattttattgaccacagtttcttaaacatagatatctctcatatattatcaaacacttatggtgaaacactacatttttgttcataggagttctccatagcagaattcctccatctccctttactttgccctgaaaaaatcagcaccccaggaattctttatctttcaaagacggcaacatataaataagcatttgagtttcccatacaggaattttttgcaagtctggcttagaaaatggccatgttctattcaaaactctttgaatttctggttaaataaaaatgccaactatgcctttttcattaaataagtctatctttcattatctaaatgtatgtcctactataagttcccaatggcagctatgtccttgtgcttagggattgcaagatgaaggttaactattaacgacagtgtttctgaacctgaagttattagaaaatctttagggactccttggactcttggaaattatgtacaaaattataatgactcatttgtacagtcatcccttggaatctgtaggggattgattccagagccaaataccaagactgcagatacaaaacccagtggatgcttaagttccttacataaaatggtatagtgttaatatttaacctatattcttccatacactttatctctagaatactgctaataactaataatatgtaaattctatgtaaatagttgttataaacaatgatttttattattatttttgtggttgtattgttacttttgtggaatatttttaatccccagttggttaaattgtggatgaagaacctactaatatagagggtcaactgtacattctcttgggaagtatattcagagctttcattagagacttaaaaggaacctatgttactcccctgccccacccccaaaaaagttaggaactactgcttggtgggggtaataaactatccttggaacatcagattctttagatacatcatagagaattggcatctaaagaaatattctgtggtaaccagcttccaagatggcctccagtgatctgcactttctggtattcagatttttgggtcatctcctttcaaattgtatcagggttgatctctgtggccaagaaaattcaggaggagttatgatgtgccactttggaggttaggttataaaaactgtggcttctgtcttggttacagtttctctttctccaatcactcactctggaggcagctagctgtcaactcacaaagacactcaagcagcctatggaagaaggccacatggtaaaatatggaggcctccagccaacagtcagcaaggaactgagacaagtcaacaaccatgtgagtgactcgagaagtgcttctctagctccagttgagacttgcagtagcagcagcctcagctggcggcttgactgcaatctcttgagagaccctaagctctcctgaattcttgatccttagaaactgtgtgaggtaagagatatttgttgctttaagatgctacatttggggataattcattacacagaaatagatatctcattcacattatcttgactggtcatgattaaaagaaaagtgaatgtaagaaaataaagtgtttttaatgctgaccttccctgttaatcctagaaaattagagtttgaaataataatgtcatagtcactattcctttaatcttgttggtaaataatgaatgcagcgtggcccattcaccgccagcacttggtcaccattgtgatctacacagcaagaagcagcctaacgacctgtctgttgaaacaaacaagttttcttttaagtgatttctttgtttccatttataaggcaccaactttcaaaggtgttctgggaaacctttcttgtatttcttctaagcaaaatcaattcaacagagagttcacgctttgcctgtgatcaatggggaagtaccagtgtagctttcttttttttcctatagggctgctcatagtcctccgatagactttacagctgttagttttgctgcagtagtgacttgctaaaatggtggctcatttgaatggtgcttgtattaatttacactcccaccaacagggtacaagggttccctcttctccatatcctccccaatatttattatctttttttcttcttcataatagccattcaacaggtatgaggtgatattgtggttttgatttgcattttcctatgattagtgatgttgaccactttttcatatatctgttggccatttgtatgtcttttaagaaatgtctattccgatcctttacctttttaaaaaatgagttatttattttcttgctattgagttctgtattttgaatattaacttcatatcaggtgcgaatattcatatcggatgcaaatattttttgttattgtataggctgtttcttcatactgttggttattttcttgtggtgcagatgtaagcttttagttcgatgcattcccatttatgtacatttgcttttgtttcttaatacacctttgtattgagtagatcagatcctttatgaaagcaagaagggatcaatgattacctgatggagaagaagaaaattgtgaggaaaagggtcaatgaggacattctttgctgttttgcaattttccaatgagctggtcttgatattatgtttgcgtaaatagcttggtctgatcttggacactaaattccaatccagcaggttctatctggaaggagactatatgatggtggagacacaagtctgaaggtgaaatattgcacgatgtagaaatagatcaaccatgcacatttatagaacatctactaccaggtgctaggttctgtgctgagcaataaacataattcctctgtaatttttgtttgtttgttttgtttttgagatggagtctcactttgttgcccaggctggagtgcagtggcgcgagcttggctcactgcaacctccgcctctcaggctcaagcgattctcatgtctcagcctcctgagcagctgggactataggcgcacgccaccacacctggctaattttttgtattttagtggagacggggtttcaccgtgttgcacagggtgggcttgaactactgagctcaggtgacccgcctgcctcagcttcccaaagtgctgagattacaggcgtgcgccaccacacccagactcctcagtaatttataacctagttgaaagatttggacatatgtatcacaagatacctatgaacaaaggcaagggcatatcttatttataagatgtttagatagatttcaaaggaagtttttcagccaaaaattccatcatgtttccatttttgaaactaaataccaacatatctcaaattcagatctcaattacttctactggcaaaatgtaaagaccattccctcattcatttgttatttctccaagtatcctgagtactggatatctgaaaggctctctgctaggtactttgtagggtaggaaaacctcaaaggatgtgtggaaatgaaaaaagtttccaaatacttcttcaaattttgtgaaacttatcaactgaaacaaggttgatttgggtcaaacaaggtttgtgaagtaaaagcaaagcaattttaaataggctaaaaccccatgggttgcaatgaaagcaatgttaagatgactcttaagtaacttagaactgttgaggactttggtaattaaaatctcttcctcatagctcccccagcaatcaggaaacaaggatagtttggattaaggtctcataaataaacatacagcttgtcagtccttggagatggagaagtcattcttgagtgtgccacatggagggctcagagataagtgatgaccctcttgtcactctggcagaaaatatattaacttctttaaaccaagaattatagtgatttcagtggtacaattacaaggagtgacttctgggacttgcataaatcaagcttatttaaatagtgtttcagaaaagaacatatgctactattaaagagttggaaaaaaacaactgcaatcccataagataaagttaggtgagaatattcatatttgtttcagatacaagtccattatttatgtcaaataattaaatacctctttagatatccattccaggggaggctcttgagcctttcacctctctcatgtccaaacttactagttatttcaatactgaaataattccagttgttcatgaattatttgatgagatttagagtgatctatattagttaattcatttatcagatttgttgaatacctgttatgtgcactggatggcaattggtgccatgttgtatatacattggacaaaggcaaaattctgtcttgggatgcttaagtatagtgaagaagaatgacaagtgcaaaaatatctaattccaaagctgagagaggagagaaagattatttaagttggtatggtcagataagtaaaacagtattttaactaagctttgagaaatagatagaattctacttggaacattgaggaggactccatggaaaagtaataaaatgaatgaagaccagagccaggctggaaaaaaatctttttaatggaatagcagtgagcaatgcagaaaagctagagatcatcttactgctgtgcactctaaatattccccatggctgctaccttgtccaattccctcacagtcctgcctgctacagaaagcgtagcagttttctctttatcgatgatgagcaatagaaagaaatgcttcactctgcctaggcaacaggcacatttaatatgggatttctgttgacagtgccttaagccatggagctagctaatcagcaccttactcattgtatgacaggaaagagaagagatctgggaatgagcagatcattcagcattcctgcaaacatggagaaacagagccagacagctagctctcccctcccagtttctatgagttccaatgtgaccaaaagccttatcttggcctttgcacctggaggtcaccgctgccgctgggaggatgagtggaggaacttgggatgtacatgatagggtcagccagccagcaaatgagtgtttgcagagtgactagggaggagcaaaggagagctttcactgctgtaatagtccagaagttgctgctgaatcaagcgaaaagaataagcaaagtgtttcagaagtcagcctgcttcacatcttgttgttcatttattccctctattctgaccactgagcccaccaagctctccttcttgatataacttttatcatatttaatattagggcaagactagtttgggatcttatgtgtctaatttatataaatgtagcaaatagtctttttgatggtaagataaactagtgaattatctctaacataatcaataaattttcttattgctgggtgtttctcaaccatggtttcgcattaaaatcatctagcgagcttaaccgccccctccccaaaacacacacacatacacacacacacacacacacacacacacacacacacacacacacacaattcccaagctgctcctaggtcatttataccagaactcaggttaggactcaggcaatggcgttctttaaagctctgcaggtgattctaatgtgccgctggagttgacagccactgttccaaatgtcttgaagatgaataataaaatccagattggtagtgagtaaaaatatatgtgtgtctaatgtgtaagtctcaaattattaacatttctcaacaatgtatttccattttaaaaatcatattttaaggaatgaccttcaaaattttgttatagaatattattttagtgatgtttctctgttagtaatgtgaagcatgttgcacataaactgtctggagaatgtggcattatttgcaaacatgtcagagaatgcagcagattttacaaaggtttatgaaaacaatatgcttcattatttgttcacataaaaagtaacaaaattagcttcctgttaaacagaaagcccatagagtagaagagaaaagggtctggttccttattcactcccagctaccgtgagggtgtcttattgcccaaatccaggacatctttgactttttcttctcttgactgtctaatctaatgtcatgtaactataataattcaaaataaaagtagttaaaatttaaaaatatatttaaagactatcaagatctgttgattctacctctgcaaattttctttcacaccttcatcatttgtccatttttgtggccacaatcctaaatcaaactccctgttacctcctgccttggtaattgtcatatgctccccatgcaaattttttctcagacattgcctctggccaaagatctgatggcatcatgtttttcactcatcttcagtggttctctgctacccacagtaattttacaaaacattagctgggcattcaggttctccgtcatctggccccaaccttattcccaagacttctcccctttgtgtataatactatgaaatgatctaactgtttggtagtcctggacatggctatgttctttctgctgtcagaaccctggctcatgctggtgtttctgccaatgcctaaatcccacccagtatagagggctcagatttcatctgcttcacaaagccctgaactacagagttaaaagtaatgttttttctactgtaatcacatcgcagcacattatctgaaccattttaaaaatatttccccagagtcacttaatctttctgagcctctgttcttttattcataaaatgagaacaataatacctacctaaaagactgcttgtgaagagtatgattatgtgtgtacaaagcatagtgcgcagtagacaattttcaaatctttctttcttctctctcctttccttccttctttccttccttcttccctccctccctccctctctccctcccatccgtccttccttccatccttccttctatgtattgtccattataactttgtaatttccttttgggcaggatcctgtgattggtaaatttttgttttccatgcagtttctaggctaatgctttgcatgtgtaggtactcaatgtaaaggtacatgttttaagtgaaaggacccaaaattcatgacttgctgtacaaatgatgatcagggtttaggagaggagatatagaccagaaatctagttgttgttttgagttattattattacttaaattatcctatatttttaggttaaaaactcattgagcaaatcattatcttgatgagaaatcaagagtcaggttaagtaaatttattttggttagatgtcttctaagcatcagttaaggattcaaaccaaggcctctcccatgtgaaaacatatattgtttcagcttatcaggattggttagattatctccaagattatgtctatttaaatggcagttattgcagataatatcaatgtcctaggtccacaggaaggcaagaagtagacttagcagtaagttgctgagcaggaattctgaaaagggtgaccaggatcaggtgaagcacgtccagagagtaaagggggtaagcaagctcttgttattagcccatatgtacttaccctgggctcaccgaagagtcctaaagcaaagcttgctgtggctgcaacctaaggattggaacaagtctataatccttcaagagccaagtgtggatttctcccttctactctctgcctcagtatattttccatgttttcttacttgttctgttgctggaagtttccttctttccaagagatactcagttttaaagaagccacaggtgtctttgccaaagcttgctctctgcatcctgttacactcttagagaatcccctgatgacgtcattcaagacagcctactttcgtaattgctgtggaaggggcagaaggtcctgccactacattgctttctgtcacccacccccaagatggaagaacaggttgtctctgaggaattttgatttggggcacattgattccagtctctctttactggagcttgaaataggggggccaattttcctataaaaaagagtatgaaactgatatccaaagagacacacgatgagaatctatgaactccacgaaaaaagagctgataattataattgtcttcattcttggtagctttctagatgggttctaatcccgcaaggggcttagttgccttcctagctttggcgtctataaaatagtcctataaccttttaataaaggtttaataaaggcctaagcccacatgagtgagttttatacattcaaacaatctcctaagtgtgagagttaattaatttttaaactattctcgaaattcagccttaatttgcttttgcttaagctgggtcactaatctgtgctgaggacccattatccattctttgttaggttctacagtttacctctagggtacatttcatagtccttaatgtctcttctgtataactgattatttatggaatttcatgatgcgttaaatactttggctgagtagcaaacacatttcatctaatctttcaattccacaacagtactactgggcaacatttttattcttggtggatacaatttctttctttttttttttttctccttttattccttcctccttttctctctctttctttcttttaaatgtttgtgatatcaggatataaagagccaggtagaagagcacagaattagaaaccagaaaactgagtcctagtcatctcatttctcctggcttcacttttacccttaagtgaggagactatacccgagttccacctagcttgcaaattctataattcaattattccatcaccattctgaaatataccatgtaattatagaaattactagaaaattttttgaaatacacatttcccaaatttatttgaccatggaatactttttaaataattatatattggtagaacatatacgatagttcatggatataatatgcactttgattaaagaatacaaaaaaatggtctgcaacaattaattgcttcaagaaatgattaaaaaattcattcatattctaacttaattacaggaccaaaacaataatacaaattaaatagattaagtcattttatttttattaagtacataaaaaagacaaaaatggatgaaatgatgacaagttgcataacatggagcagtgatgattaagaggcagtgtataccagtaaaattagttggtaaatactactaatagatacttagcattgacattaaaattaatatttatatgaagctttgacatttaattctacttcatgcattcatgatacacccaatcacttgttttgcaattatttcaatgtggattcttgcataataacaattatagatgtgtgtttaaatatattaaatatattttataagaaacaatgttgttggtaatttttcttcttagactactcagtatcttatagtttgagaaaaacagacctatctgaacctagatactatatatgtttccaacgagtagcctatttttcccttccttttcctctattgctcacgtgcttacatgcattattattgggttatatattgagttattctctcgttggcttttgtattctgtggcattacatatctttgatagcagtaagtttgacactcaaattttgtagaagtcaatggcagtggtccttttataggtttaaacttacctgactgcattatatcccttgagaatagttttaagggattttcattgaaactactgtatatgattaacatataatgcctcctattatgaacttggaatatgcacattaaaagagttataagttacagttaatcatttgttcattgctttctttatagatcttgagaaaaacctgatgagtgtagcattgccattttgtaactaatccttcatgtaatgaacctaagcttccattattgtgaatgaattagtctatttaggaaccgctttggcttagcggtgaactgtatttcctacttaaggagccaaacattaggaagcaactgtagcagtgtacagcagcaacttcatcattttggaattttaaaattctaccttcagggatcttagaaccatcctagcttccgagatctcactgtgagtactggagtgagcagagttgtaccaggatggagagattgctaatttccaaaaatgggattactgagttaaaatataatcctgctttcagctaaaaacaaaaaaaccccaaaaaaccaaacagccctttatgacacaatttcactatcctgaacgcaattttatttcattgattataaacaatgtgaatgtagataccaatattgcaattatgactaataattggaggcaattatttatagtagttatatatcagtatatatatttaccatttatactgatattaatgactgtggctttttaatagtggccacagaagtcacatagcatggtttagtgaagtttggttcacatttgtaggcacttcagaaatatcatctttgagaacacacacacacttaagttcagtgagaacgtatataattcaaagaataacataagcaatgatttaaacttctatgtatgtttcagtctgcctcagtgttagcagcaggaaaattattctttacaataatgaaagacatttccagattcaaaaaaaagggaaaaataaaaaccatggaaataatatatttggaattacagggctactagcaatctaagtgttgtggaaaatcttggtaaatagttcagtgaaattatatagatagaagattgattgaataaacctactccaaagcattgatatgccacagcattcttcctttggctgtgttctgcccaatattttaacaaggggttgcatcaaaacagagtgatgctgatcaactcctgaaaaatatttaaagttaaaagaaatgctaagcaaaaagaacaaagctagaggcatcatgctacccaacttcaaactacatgctacaggaatacagtaaccaaaacagcatgttactggtacaagaacaaacacatagaccagagaaaaagaatagagaacccagaaacaagactgcatacccacaaccatctgttctttgacaaacctgataaaaacaagcaatggggaaatcattccctattcaataaatggtgctgggacaacgggctagccatatgcagaaaactgaaactggaccccttccttacaccatatacaaaaataaactcaaggtagattaaagaattcaatataaaaaccaaaactctaaaaatcctggaagaaaatctgggcaataccattcaggacataggcacaggcaaagatttcatgacaaaaatgacaaaagcaattgcaaaaaaaagcaaaaattgacaaatgggatctaattaaactaaagagcttctgcacaggaaaagaaaatattaacagagtaaacagcctacagaatggcagaaaattgttgcaatctatccagctgacaaaggtctaatatacagcatttataaggaacttaaataaatttacaagaaaaatacaaccccattaaaaagtgggcaaaatacatgaacagacacttctcaaaagaagacattcatgtggccaacaaacatatgaaaaaaaaaatcactgatctttagagaaacccaaatcaaaaccacaatgagataccatctcacaccagtcagaatggctgtgattaagaagtcaaaaaacaacagatgctgcttatggagaaaaacgaatgcttttactctgttggtgaaagtgtaaattagttcaactattgtggaagacagtgtggcaattccttaaagacctagaggcagaaatatcatttaacccagaagtcccattactgggtatatacccaaaggaatataaatcattctgtcataaagacacatgcacgtgtatgttcattgcagcactgttcacaatagcaaagacatctaaatgcctatcaatgacagatttggtaaagaaaatgtggtacatatacaccatggaattatgcagccataaataaagaatgagatcctgtcttttgtgggaacatagatagggctggaggccactatccttagcaaattaatgtaggaacagaaaaccaaataccacatgttctcacttataagtgatgatcagaacgcatggacacattgggagtggggaaacaatacacactggggcctttcagagggtaggagggtgagaggagggagaggatcaagagaatagccaatggatgctgggcttaatacctgggtaatgggatgatctatgcagcaaaccaccatggcacaatttacctatgtaacaaacctgcacatcccgcacatgtacccatgaacttaaagttgtaaagtaagaagaaaagaacttgtctagatgcaagttaatctgaaaaaaatttatattaactgagcacactcccagccccaataacataggtgtttttgtttagcaaggaataagaaaagaatggatattgggtggatacctaatagtagtctttgtcagactgaatcgagcagatataataaaaaaggaatgtgtgacaatgctatggtttaaaaataacatgatacccagcactttggtaggccaaggagggtggatcacttgaggtcaggagttcgagactagcctggccaatatagtggaaccttgactccactaaaaatacaaaaattagctgggcatggtggcagacacctgtaatcccagctacttgggaggctgaggcagaaattacttgtacctggaaggaagaggttgcagtgagctgagatcatgccagtgcactccagcctggacaacagagcaagacttcatctcaaaaattaaaaaaaaaaaagatagtccagaaataacaagacacaatctaacaggaaagaaaggttaatttcttatttaggctttaagaaaaaaattttaaaaagcagtagcgcaagtacagaaagacctcattctcataaaaatggtagttaattgcaagtactgtatcaaatatgtgataagtctatctaaaaatcttctaaattgaatctttcttgagggaaagaaaatcaacattaattgaaatattattgctcagacaagaaaggtagcagtagttcattgtgctcaaacaattgtcagaccacctatggaatatcctgtacaatgaaaaattacaagtttcccagagtgtgttcttcagagcagtagctcttagaacattaatgattattatgagaagggaaggtctattgtcaaagaagcttggaaaggatgagttgttaagcaaaaggtgtcttttgagcagtacttttcatggtctttaatataccaatatgcattgcagctgtccaagacaggaggccattaaggaagcctgaagagaaatgtcccaccttagtgtcctgaaaggatatgcactcctctatagctatttactttttactttcatcccctgacctttcttccagcactatggtcctctcttcatcacttctctctattttgattattttcttctccagtggctcctaacttctttctacaaatgcatttgctctgtctgataaaaatcattttaactttgcttctccatccagctaccttctttttttacccttcctgttactgcttctggtattcgatggtttttccttttcccttcccccatttttgaacgatagactactttttttcatagctcatcttgcacgttagtcttccatgagatatgcctgtaggcatgcacaactagagatgttaagtagaggcagaaagaaaagaaagacatctggcaattagatctgactttatccattctggctgttataacaaaatagcatacactcagtagcttacgaacaatagaaatttatctcccaaagttatggaggctgggaagtccaagatcaaggtgccagaagatttgatgtctggtgagggtgtgctttctggttcatagttggcaccttatagttgtgtctacatggttaaaggggcgaagggtctctcttggacctcttttatagggccactaatgacatctcaagtgccccatctcaaaatattatcacattagtgattaggtcttagaatatacattttgaagggacacaaacatttagagcattccaaggtcttatttgtttttcagtggttaagagtttcgtcagggaggaggagtagaattatgtgagcttacttcagagcagagtttactaatcttctatgtgtgtgtatggagtgggtgtaaatcctgaatcctttcagtaagaagggtacacctatgaatgccttctcagtacacttggccctctgtacccatgggttctgcatcctgggatttaactaaccatggatcaaaaacttaagagaaaagtttgcactggacatttacggatgtttttttcttgtcattatttcctaagcaatacattataacaattacttacataacatttacgttatactaggcattacaacaaatctagagatgatttaaaatatatgagaggatgtgaatgggttataggcaaacactatgccatttcctatcaggggcttgagcatccatggattttggcgtctgccagaggtcctggaagtaatctcccacgaatactgtgggacaactgtataatagttttttgttgtttttagtttgtttttggagacagggtctgctatatcacccaggctggactgtagtggtgtgattgtagctcagtgcagccttaaactcgcagtctcaagcgatcctcctgtctcagcctccctagtagttaggaccacatgtgtgggccaccacctggatcatttaaaattttgtttttgtggagatggggtctctacaaaagagatgtcacttaggtaggtctcaaactcctggcctcaagtgatcctcctgccttggcctcctaaagtgctgggattacaggcaggaggtaccacactcagcctgtataatgtttataagcacaaaataaaattgtagaattaaaaatgaaaccagttgtattaaaacaaattatacaaatattaaaataaaaatttggtatagttatatatgtgcatctttattaatgtattaaatcataagatccagcagatcacatatctaacatacttaattttgaagtgcttgcaagaagtctaatgagataagaaggtatctatgatttttactggcaacaaagtcacaaactacagtggtttggtaactatattcataattgaagaaaatggtatttttcagttacaagttagtaaaaatacagatgtaaacttgtcatacaagtttaccaatctcctgaattctttgtggactccaggttaaaaactactaaatggtagagtatatagttacaaggagtcagatttaagctcattttaagtatatgtattatgtgtatgtaaagccttaataattaagatgtcctagaatgaaaggattttctcacaaagtagtgatctacctgttaatggaaacgtccagttagcatctagaaaaatattgaggatgttgtagtataacactaattaatattagctagcatctactgagtgcttgctgtgttttatgcactgggttaggagcaatttttgcattgtgtcttttttttcatgatagttacgtcaggttatctctgtgtcatagataatacaatttaggttttgatatttgttagaagttgactatagcctgcaatcccagctactcaggaggctgaggcaggagaatcacttgaacccaggaggcagagtttggaatgagccaagatcacaccactgcactccagtctggacaacagaacgagaccccgtctaaaaaaaattaataataaataaataaataagttgacggcaataagtggcagagtatgaactctaacccatatctaggtgtctccaaagcctataattggagaatattttgataataatgtaggagagagattggtgagagaattagagatcaccttgttcatcctctttatttgatagatatgaggacactgagaactcaaagaagttaggtgacttactccaggttacacagtttatagcagagccagaaattggactttgatgcctttttatgtggaaacatgagcttttattatttagctcttcatctggtggaagtggaacacaacctgaagagagaggcaatggactacactatggtttggaacagagtgtatagtaatttcctatttcatttagacaacagggatatgcctgaaagtgcctttacccatgtcatgcatttattcacaatgaacacaaaatttacttgagtaattttttttttctcgaggtatagtctcgctctattgcccaggctggagtgcagtggtgcgatctcggctcactgcaacctccgcctcctgggttcaagcgattctcctgcctcagcctccctacttgagtaatattttaaatgtaaccatagtgaactgtccaatactaaaatttgtgcctttgataatatttatattatgaataaaaatatgctcttttaaccatgtcctcatctattttaccagaaagtatcttgtgtattgtcaatacaaagtatctaatgcatgaatgactgagtatgattgtctggttttctttaatcactacttacaccaaataattgggtatttacaatatactgattctattattttttactgaaatataattatagttaaatttaccattcgttaacaatgagggaagaagttgtctagattagttcaaaaaccaacatgtaaattctttctggaatacggtaatacataaatgaatatgcaataaaagtgtgaaaacaatttttaaataaaaacagttaaattaatttctaaaatatacagggattacactaacaaattttcctgagtatgaaatttaggaagcatgcttttctaaaatgaatgctttttaacattatttataaacaaatgttgtttctaatattttatatagcctacatgcaataggtgctcaataaatactcattaacttagttcaagatgttgacagaacacatggtttttgttttcctttacttttcctaatacccattaaaatagtagaaaaactaaatctgtataatgcacaacaataaagagaatggggaaaaggccatcagtggtaagagattttatcgaatttctggaagatgaaatatgagtgagtggtgttgattactgaagcaaaacaaagtcaattattgcagagaatatttgtagagggagctacacccaagaagaagccctaataacatggcagaagctaacaaggctccagtttcagataagccaatgctgatggacattgaaatgagaaacatagatgtaatcagcattttgatcaagagcatgtgcactagtttttgctgcccaatgagccactttaaatcataatggcttaaaacaaccatttatttagtttactattctgcctagtcagccattttggctgggcttatatgggcatattcctgtgtctttgctcaaccaatcagttgatcagctctgcttctgcaggttggttgggtgtcagttagcaagataggggccactaggccttgcaaatctcatcagactagtttgggattgtcacttagtagaggagcaggattataagagaaataatataaacgcaagatctcttaaagtctaggtttagaattggcacacattaacttcattcttgcattgcttgactaggttataagaccagtccagattcaaaggatatcgcaacagactgttatttgttgatgagaagaactacaaagtcacattgcaaaagggtggatacagggaaggtataaatcttgagcatttgtgggtctaacacaatgtagagggcccagctttatccttctctacttaccacatctgttctcagccccatactagaatacgtggcatgaagccaggtatttaccatcacttcaacagaagcgaaaacaaagcaaaacaaagtttatttaatgaaaacattaaatgaaagaaaatagataaaatatatttaggaaaatctcttggaaagagtatattaatagattagagagtgtgaatgaggttttggaaaaccttgagggtgtaaattgatgctagaaacatccttctctgagtggcctactaattctgacataggaatcagagaaaaggaaatgtaatcttaactatttcactttgcagaaaataatctttacatagtcataaaaatgaaaaccctgtttatagttttcaactttagaattgctccatagacaagtcatataagtcttaactgtgtatcagtgtaaatgttttcaaacttaacaatattaaaacaccaacctgggacccataggcacagacatatcttttacatctttgaaatttaaagctcaatgtgatggtctgtgtcttgactctatttagccaaaccactgtgtcatcttttactaatactctttccccatgatagtagccccaagacaagtaagctggtctagaggctcagtggatgttcagtgacagtgcaagtcatcaccctttactttttgcagataccacaaagctgtttttaagagtctcttgccatcctgcctatgactttgtgcagtggaatcagttgagttcatgggaaagcaaataaaaggatggtctctgtttatagacatagccctgtcttagaaatctaatctctcttatcactctcatctacaaagactgtcaaggaaatgtgtcctctcctgcccatggagacagattgggcatctcacatgaaaaaatatgtcctttgaacttgcctgagaaattccagtaacttttttctcaccaggatacttttctactgtaagcttgccaatatttggtaatctctagaataggaacccatctcaatcagcagtgcacaccatcctgttttgtgcagtctaagtttagagctgtctaagtccatttgagctgctacaacaaaatgccatagactaggtagttataagtatcagaaatttatttctcacagttctggaagctgggaaggccaaggtcaaagcaccagcaaatttggtgtctgatgagggcccactttctggcttatagatggtgcattctacctgtgtcctcacatggtggaaggagacaagtcaggtctctggggcctcttttataagggcactaatttcattcatgaaggttcctccttcatgatataatcaccccccaggccctaccttctaatatcatcacattggtgattaggtttcagcagatgagttttgggggaatacattcaggctgcagcaaggtcaaaaagaatattgcatcattttgctttagagacctttctgttctagctacattttgattatctatatgacacaataaaaaagaaagtcaggaaacctaagatcttatacttcaatagagtttttataggacaacattgattaatggctacagttaatacaaaaactctaacagcagcaatcaaatatttccattcatcacacttgaaacttggcctcaggtctatggtattttgaaattttttgttgttgttttgagagtgacatgagtgcaggcccagcttcatggatatacaaactatacattcacatgggttccacacctagatgggctcttacatcatgtagctggtcctacctgggagagagctaaaaattaagttgcagtcatcaaattactgatcagatactgaaattaaacctgaaagatgttgagaacccagagaaattctcaatcatgttaataatactttcatgcatttgacatttcttttttcctgcctcttctctctacctgtagaacttttcaagttccattattataccattgttggccctttgtttcctcctccaaagacttaaagaagaagttatgattaagcatatgaaatatgcataccaggttttctataaagattcctcggcatctctgccaagctgtcatatgagcacttgcatgttgttatataaaaacacatattttaaataaattttagtgctgttctaagcaaaaagcacatattttaaaaatctggagttttctgtttcaatttgagagaactacattttgcttaattactatttaaatcactgtaacacaatattgatgacaaaatttgagtttgctttttaataaactgtcaatcaaagaaataacatagaactttgtttttctcctctgttaaggcatggcttaactgtaatttacttgaaaacattatactgtttgacaggaaaacagaaccaccttgaattattctaacccattcagatttaagaaaatgcatcgtagcaaattaactgctatttggttttgatcattctgtctgtatcatagaaatatggttcactagtgaatcaatgagagataaaaggtgatcatggtctgtgagataaatgctgcccctctgagttgcttccaacgtagccagcttcagtgtatcagttagagtagttaatactaactgttgtaacagataaatacccaaatcccagttgctcaaacaattgaagtttatctctcattcatgctaagtcagttgatgtttctggttcaccagctgccttccacctggtcacccagacacctgggtttcttcctatgcacctgtggcttcattttcctctcaaacttcagacttctctcccatcagtatgtgaatagggaacccagagatgtttcctatgagcaggcccagaagtggcttatgttgcttccatttaccttacatctacatgtctatacaaaagaaatgtggtctagctatgggcccagggaagaaggaatgaatttcattgactctctgccactcgctgcttaaggtcagatgatactgcactctatccaaatcaatttctttttgtaatccttaaaacaaatgtgttgcatccatattatatttataacatatgtctgtttcttttggacagtattattctgtagacttcttgactgatacatcccaagatcatctttactgacttagggttacagttttggataagttatcccaatctcaggagtttaatatgccttattgcagatcttttccaacttctaggtaagaagtaaactcattcctaatcttactacttggacatagtctctccctgctaccatgtcctcacaggacctcttccttggttcagtattgcaactatctcccagttttcctctttcatctctggcttctccttctttatctcccttttaacttctatttgaccattaagtgttggcaatgcctcaggcgtggtcctcctttttattgccttacactatacttcccatgcctctgatttcaatgatcacttatatactaaggactcgccaatttgtatattcagcccatatttgtcctctggaactcagacctgtatatcctaccgctttttcaatatcttccattgagtgtttcagaggcattttagatccaaaatatccaaaactgaaattctgttttcccctcacagcctgcttactgcgacctgatttttctcttgtggcccttaaaactatgaatatcaacagtcatccaattcttcaccttcatcttcctccctcagttgctgtaagtaccctatcactaaggcctgtcgatttcaccttccagttatgcgctgcatctatccctctctcttcatctttcccggggccggcctgtctgtgctggcattacctgtttcctgaaccacagtgatagctgccttgatccatttcctggcatctgctcttgcccctcatccaatctgttctccatattgcagtcagtcacctgtttgaaacagaagtccaaccttatcactcaccacacacccttgccttaaaaccagttagcggtttcccattgttcttaagactattaacgtcatttttgtgtgattgtccaggggctcaataatctgaatcacaccttgtctccagcctcctttctgccttatcctgaagtatcccctgcctgtttcactccctcagcttcttgtacaccgactttccacccagtgcctcagggcactttctcatgctgttctctctgccaggaacacatgcttctgcttttctctcccctttacctagtgaatccctcctcatccttcccatctttgtaaattcacttcagtttagaagacttctctggactgttatattgtcagaactatcttctatatatgctgcagaagtatacatacgctgcatacttctttcactgtacttatcagatatgagtaaatgtataatttaatgtaaatgtgattaaattgttagtctcttttattcactgaataatgtctatttgctcatcactgcatcagtagtacctagaacaatgtctcacacacaattgaatccaataagcatctttgttctcggcagctcctcgttttttaatcttaagccctaccctaccacctagcacagagagagtctaaataagtatttatttagttgaagtggctgttaatggctagtgtttaaatatattcatttgaaagacatatttcacaaaattgccttgttggccagcccagtttgactcccaataaaaaatacaagtgtgccattttgtttcagacagacacataaggttgctatttagaaggagggtttttattgatatattaagactgccttgaacatatcaagttaatttattcccatttcattttttagccatctgtttgtttctaaaggaacaaagatttggtagaagtggtaataaatactcagataaaaaatctatgtaataaaatttctatgtaatcttcagcacttactatgaaaaaaaataagtagattatggcagaataaaagtaaaatattttctgcttgatatttagagtgttgttttggcatctgtgacttgtgctaatgacctcgggtttaagtttggtttttattgtctgaagatagctggatttgggagagtaagtcaacaaccttttttttttttttagcaaaactctaaatgtctggatgatctgatagatgcaattcactattcgagtcaaatgttgaatatgtattacaatttaggctgttcttgaagctttattaaattgagcaccaaatcttctgaagctaatggaggtaaaatcatagtcaaacgcccttttaactcaaaagaaccatgcccccaactatttctctttctcaaactattgcttctttcaggctaggatatttgggatattaaagggctcttttaactcaaaatagcaaaaccatagccctcatcttcttatttaggaagacggtctttaacatttaattctgagcacttaccttttccgtaaatgaaattctgtttctcatttggatattggcagagagccaagataaggtgagcattgagcaggataaactagatgattccttaattcagcaaatatattttgattccaattgtgtaccagaaattcttctaggtactgggaatttatcagtgaacaaataacatttctatcctcacagagcttacattctgaaagataggtaataaataattatctatctatctaattgaatcactcttctctctctctctctctgtctttctctctttgtctccccgcttgggtctttcaaagacatttctgcaggagtacagctatgagctgtttagcagtcagtacaacctctggaagatgggtgtacctgcccaataaaggggatctgagaagaccgtcagtagcatctactatagaagataaatgcagtattccaggcaggagattatgatggcttggactagggtggtagctgtgtttacggtgagaaagataagatctggatatatttctaaggtagatttcacaagtttgctgcttgattgagatcagttgcaaggaaaaggaaagtcaaaaatgactatataaattctggtctgagaaactgtgcaaatagagatactgtttactgaaatggaaagggagagatcaagattttcatgttaaatttggtacattcattcagatatatcagtggaaagataggcagttggttatggtagtcttgagttcaggttggttttacaaatctaatttgggtattgatgattttaaaactgaggagttaccatagataaataggaaaagccactctaatgttttgaagttggaaattcaaaaggaaatggagcttttgagaaggagcagctggtgaggcagaaatacaacctagagtgaggaaaggcttggaagtcaatgaagatagtgttttacaaaggaatgcatgattaattgtgaatgctgctgattacttaagtgagaactgagaattgacaaatgaatttagcactgagaagaccttggatgatcttgagaagagctgtttcagtggagtactataaacaaaaacataggagtacattcaagaagaaatggtgggagggcaagaactgaatatcatgagtttggaaaactcttttgaggagttttactttaaagaatttaggcagagaaataagatatatagtagttaagacttaaattggacatattatggcaggttgctatgtaaatgggaagaatccagagaagaggaggaaattagtgatgcaacagagacagtaataactggagtgatatacttgaagaggagaaaagagatgatatcaggcacataaatggaggatttgataaatgtgatgggggctgcagagaaaaattgttttctgatttgctattatttttttcaaagaaataggctatcaactgagtgtgaggatagagcagaagctgttaaaaatttaaggagagttgtgaaataatcatctgtaagcaggagtgtgaatgaactaggaagatgtagtaatatttctggacagccctgagagctgaaatattgtaagaaataatctgaggaagttctgagtacttagacagttgaggttagggggagcattttattaaaacaatcacaaagaacatgggaaaaacagataccaacttggcaattgtcatagtattaaataaaactaattttggaaaattaaactaaaaagatgttatatgcattatgatgtttcaaaatagactagggccaatcagacccaatagtttctttatataagaccccatagtttaattatataattaagtgttacgttcaaattttgataaatgataaatatattgtaccaccatgggaatttgaaaatgcgaccatttgtactgggatattatcatgtaatattttaattttacctcttaattatcaaagtgaaagatttccatgcagtattatttggttgtggggtaattgtttaatttatttggaattttatagtgcttttgcttagccacattttattttgtggtcaaattcaaatgctgatctaatggcttcagagtaaaatgagaaaggtcaaatgggactggaaattagggttttcttcctgtcattaggtatatttatttataaaataactggaaaattcctcatgtatttaacatctgttccttctttccctggtcactgcatatcaagaagactttgacattgaggtttgatacggtttggctctgtgtccccacccaaatctcatcttgaattgtactcccataattcccaaatgttgtgggagggactcggtgggagataatttgaatcatggggtaaactttcccccatactgctctcatggtagtgaataagtgtcacaagatctgatggttttatcaggggtttctgcttttgcatcttcctcattttctcttgccactgacgtgtaagaagtaccttttgcctcctgccataattgtgaggccttcccagccatgtggaagtgtaagtccaattaaaccactttttcttcccagtctcgggtatgtctttataagcaatgtgaaaatggactaatacagtaaattggtaccaatagagtggagtgttgatgaaaagatacctgaaatgtggaagcgactttggaattgcccaacaggcagaggttgaaacagtttggagagctcagaagaagacagaataatgtgggaaagtatggagcttcctagagacttgttaaatggctttgacccaaagcctgctagcaatatggacaataagatccaagctgaggtgctctcagatggagataaggaacttgttgggaactgtagcaaaggtgattcttattatgttttagcaaagagactcacagcattttgccatgccctagaaatttgtggaactttgaacttgagagatgatttagggtatctggtggaagaaatttctaagcagcaaagtattcaagaggtgacttgagtgctgttaaaggcactcagttttataagagaagcagagcagaaaagtttaaaaaattttgtagcctgacaatgtgatagaaaagaaaaacctattttctgaggagaaattgaagctggctgcagaaatttgcataagtaacgagaggccgaatgttaagccttcaagacgatgaggaaaatgtctccagagtatctcagaggtcttcacagcagcccctcccatcacaggcctggaagcctaggagaaaatggttttgtgggccaggcccagggtccccgtgctgtgtgcagtctagtgaccaggtgccctgcatcccagccactccagctgtgactaaaaggggccaaagtacagctcgtgctatggcttcagagggcagcagccctaagccttggcatcttccatgtggtgttcagcctgcagatgcacagaagtcaagaattgaagttcgggaacctccgcctatatttcagaagatgtatggaaatgcctggatgcccaggcagaagtttgctgcaggggcagggccctcatggaaaacctctgctagggaagtgtggaagggaaatgtggggttggagcctccacacagagtccctactggggcactgcctagtggagctatgagaagagggccacagccttcagaccccagaatggtagatccaatgacagcttgaagcatgtgcctggaaaagccacagatactcaacgccagcccatgaaagcagccagtgggaggctgcaccctgcaaaaccaaagcagcagaggtgcccaagaccatgggaacccacctcttgcatcaatgtgacctggatgtgagacatggagtcaaaggagatcattttggggctctaaaatttgactgccctgctggattttgagcttgcatgggccctgtaaccacttcgttttggccaatttctcccatttggaatggctgcatttacccactacctgtacctgcattgtctctaggaagtaactagcttgcttttgattttacgggctcataggtggaaggaacttgccttgtctcagatgagactttggactgttgacttttgggttaatgctgaaatgagttaagactttcagggactattgggaaggcatgattggttttgaaatgtgaggacgtgagatttggagggcccaggggggaattatatggtttagctccgtgtccccacccaaatctcatcttgaattgtactcccataattcccacatgttgtgggaggcatttggtgggagataattagaatcatggggcagtttcctccacactgttctcgtggtcgtgaataagtctcacaagatctgatggttttatcaggggtttccacttttgtatcttcctcattttctcttgccaccaacttgtaagaagtgccttttgcctcctgccatgattgtgaggcctccccagacacatggaagtgtaagtccaattaaacctctttttcttcccagtcttgggtatgtctttatcgccacatgaaaacagactaatacaaggttattctatgagttagaaataattcctctaaaagtaacacttgctgagaatttccctaccttttctgggcttttaaaaatgcatcttattcctcatcccctaaagtgggtgtgttagtcagggttctctagagggacaaaactaataggagatatatatatatatatctcctatatatcctatatatatatagtattaactcacatgatcacatggtcccacaataggccttctgcaagctgaggaacaaggagagccattccgagtcccaaaactgaacttggagtccaattttcaagggcaggaagcatccagcatgggagaaagatgtagagtgggagtctaggccagtctcatgttttcacattcttctgcctgctttatattctagctgtgctggtagctgattagatagtgcccactcagattaagggtgggtctgcctttcccagcccactgactcaaatgttaatctcctttggcaacaccctcacagacacacccaggatcaatactttgcatccttcaatctaatcaagttgacactcagtgttaactatcgcagtgggtaaaagccattactaggcaacccaaccgttgctgcaggttgatgcagcaatgagtaggaagatgtggtgggaagatgtgggagtataaacttcgccaggcagtaatataggtatataatacatgagcagggctgcaatactctcttaggaactggacagctttatgggccaaaccaaacctcaaaacccagctgcccacctgacacaagactgtccatgggagtgaagttctgcagggttctttcccatcattatcccaggggaagagttactctagagaatgcccacttaaaaggtatgtgagtctgactctgcagatcacccactgtctacacagctcttgtttctgaagagctgtccttgcattgtcaataccttggtgcaacatatgtggcttcctgcccttctgccaagtggacctcctcactttgagcacatggtaagcatcctccataggtacacaaagtttgtagcaactaactcctatctggagttactcagacccactacctctcctgttagtgcatctatgctcttcacaaagtacagtaagctctgcttcacttgtcttgaaaacatgaatttgttctaatgcaatggacatattggagaagaatttgatgaacagctaaaaaaagcaatagtataaataattttcatggctctacatgtaacctctggaatgcataacaatgcttttttccataagaagatgtttttctgtgcttgtagattattcttttagacctgtaaagaatgcttggaaataattgatgaagtgccaagtccactaagtttctgtttttagcttctatcctgaagtttctcatattctttacctttacatctctcagtgtgagctcatatgaatctgtggcttcaggtcccatgtatatactgatgacacccaaatctcttcttgaatgaccaaagaccaaactttctgagtcacagatttttatttacatctgaatgtacccctagtattttaaatttcttaaatataaaagtttaatatttctcatacccacttatgtatatgcatgtgtgagtgtgagtatgagtgtgtgtaccacatatacttactatgtgtgttaggcattgtcctatatgtttcatatctattaactcattaattccccaaacagccttatgagttaagtcttctcattatgtccttataataaatgaagaaactgaagccaagggattaagtaacttatccaaggtcaatgaaggagctgagatttaaatccagaaaatctaattccagaggacaaccattttccaaacatcatgcaatccaacaaggtgaaagcctgtaaggattatttcaattctttatttgaatctctgcttcagcaagcacattcactggaggaaagatatccagcctttggttacagagaaggcatgctctcagaaggctcatatttggtttacagttacttgctcattgatttttgtgagttcctgaaacttacagaactttcttaggtgttcagtcaaattgtaaactattatatgaatagtgtccatcatagttttcatatgaacgttaaccaaggcctctcaatcacaggtggaacatgtgagcataaggttaatatcatcaagtaactggtgataaggctaaaatgatggatgaaagtcagattgtggaataccttaaagggcagaccaacaaggtttaaggactttatcttgctgttggtagtaataattttttgtaccaggagtttgccatgagcttcagaccatgtttcaggaagaatcagttgggcctgtgtgtgtagttcctggatagtagagcatgcacagaccttgagtgcactcactttaggggtcttacagtctggtgctgtggttctccaactttagtgtgtatcagaatctcttggggaaacatgttataatatcctgggagggcttcataccaggactccgtcttcagagattttgtttcagtggaaatggatttaaaaggcagtgagctgcattttcataaacaccactcttgaagatgataatgcaggttgtttgagaaacactgatctagtggctgtggaattgatgtaagtgtcaggcaaaaatggtcaaaagtaggatagttggaaagtaagaggtggaatttcaattctgaatggccatttgagcccacatgttttatttatttatttattgcagattctcagtaaacacacacacacacacacacacacacacacacacaacctacatccatcctgaaaaacaggaaaggtttccatgcagaggtcaaaaactgtgacgtatatctgccatatatagtgcctggaggaccaagctgaggaaagaaaccatcagcttaaaaacccaggcacaaattgaaaagcattcaagaaaagcaagtgcatgggattcctgagaaaaacttcatcaaaccctcaagtgtgaagtagagtaactggaacaaaagcggaagcatgacagtcagcataagtaaacctcaacttaaacagtctcaaggagccagaggtcaccagataagccgcctagggaaatgggttgactgagtctcttgcagtgatcagttcaggataggactgcttaaagtaagaaactatgagagttaatgacagaaacttgtttgggtaatgctcacttttagaaaatagagaaaagacagtcaacagagctgataggaaacttgaaatctatgcagtggcctagaaacaacaacaacaaaaggagtgattttcaggagaatgtggttaaattgccacaagatatacaaatgtcaaacaacatgaagataaagaaaagatcaattgtttggcaagttggtgctcatgtcatctttgtgagagatttcagcagagtggtgtgaacagaagtcagattgagggggtggaagaaatgattaagagatgaagaaatgaagtcatcaaaggttcaacagtctctctgtggtgtgtgtgtgtgtgtgtatgtgtgtgtgtttgtgtttagtagcaaaaaggaaagagggttggtagctgcaggggtaatcagagtagaatatttttatgagccagaggtcttctcttcatgtatggtgagaaaaggaaaggaaccagaaagaatagtaactattcaagatggcgaggagtaaggtgatgattgatgatggatcatgtgttgtgggatcagggtctctttagagttaatataaatcaaatttcagggccatgaagtaagacagtacattcatattttattgtagttaattaattctcttaaaaagggaatataaagggaaggtaatagttgcatatttatagattgtagtctaatatgagctgatttataaaatgttggcattatgtttttgaggtggtaggataaagaaaagaaagtgaaaactttaagtgtagggttgagtttatcaggaatgtgtttgatatagacttgtgagtggtaatctggaatatatctagtatctaaagatactaaagaaaaacaaagggccagtaggccttataggagaaaatggattcatagctcttaagggataaaagtgaaaaaatgacagatcaatatggctgttgttactagaaccattcctttgtttggaaaaagtgttagttactcttaaataatttaatgccaaaacaaaatacaacattaactgaaaaggagaatataaagttatatcaacactataattataattatttaaaattacttatgttgtggataagagttggaaggaaatatttttttttttagaaatatgcaattttgggtaatgtcaaattatttttcttcttcataataatttttgcagaaaaaatctaagtatagctaacattagcttatgaaagtaaggtgttttattcagatctcataatctcagatcttttgaatgggttgttgcaaagggattaacaaaaatgttgcttgctttataccgttctgcataggtagctatacttattaacatgatagatgcaaactggtgttcagttgattataatatattatttttgcattccagatgtcatttcctatgggcaatgagtttgcaatttcccaaatgtaagaatttaattttttcctgctctcgtttctgatgtctttaagatctttgatttttttttctatttagcagcaccaaccgaattttcccataaagaaatatctcattaacccaattattttcccataaataattaacctaattatagactatcagtttctgcattatgaggtatttataaagctgacagaattaagaatgtacattttctcctctgctctttatctgggacaacacgttggtcaaatttctgttatgagtggctttagaatgggagacttccaaaggattatgttgtactggtggcactatatggcaatggggggtgtcagtaggcataagggggttacccttattaacatctttggaagctcagaattaaatctatgtaatttttatatgctattgctcctcctatagaactctgggtctcaaccttttgtctgtgggcaaaagttcacatgcacaacaccatctaggttggtctgtgttgcacatggctgctgaagatgtaagagagactgtggattctgtgctgtttctcaggccctcactataatccatcgtttgccctcccatagacttgaattatgacaaccaggctgggactcatgctatgtagaagacctttctggagatgagttaaagatacgtagtccaagcattgtggcaggagccattctttaatagtttcatgtcttatctgtaaataatgttgtttactacaaagcataacctccaacttaaatcttctatactaagttgtgagcaaagaattgagcacacaacagcaagatctaggttactcctttcccctccattcacgtaaaatcttatgtgaatgagtatgtgattcagttactgaatcagtaaactggtcaataattcacttatttcacctaagaagaaacatattcttttttaaaagcactgaatattatattgatgttggtattataatacaatggaattgtgtctacctagtacccttatttctagatctcaagtgactaaacagcctgaatctggaaatacagagaaaaaatacacaaagagtcgtgaatttaaatagcaattctgtcactaactggctgtttaatttgagtgttttatttaagctgtgtaaatccaggcttctcactgaaaaatagagataatacatagattatagcattatattgtgaaagacacaagatagtgaacatatagttctttgccctgtatctggtacatagtaggtgctcaaaattactagttttttaaaaataattatcctcattatttggtgtcttcaatgaccttcttacatagtccattatgataataaatgcaattaattttttgttcatgacaccctgaaggtgtttctgtgtcagattcactcagagacctcatgatgaggaaggaacatggtggcgaatcttaccctggtgatgccaaacacagcagtgactcataaccattccagcactgcctatgaaatggatcaattaaaggacggtgacacacaaagatggctacttccagagggagaccttggaaattcttttatgttaacagtgtaccccacacaagaataggagaaccacattctgtcagtacactggggaagttttttcaaaatatctctggactgtgtagatttctggtaatagaaaatatgatctgccacttcaatctactgaatactgtccgtttttttctatataatggcttttaggaactgttgtgaggcatcctaagtattatctagccatccatccatccatccatccatccatccatccatccatgtatctatctaatctatgtgattatatgtgtagagcttattcatacatatatatatacacacacatacatacacacatagttatatgtatttatacacacatatacatataatgtctttatcagcctgaagtatggatttttaaagtggtaatattgccttacttattgtttctcatccactgtgacattctatgttatttcagtaagatttaacaagcaaagtgatgatggatgagagttcctttgcagcctggtgagatttttacttcatgtaaagcaaagcattttggggcaacatcagggataaacttgtggaatgaatcatttggtttttctttagtatatcctgtccaccattgggaaccagattcagtaattatgttctctggtttgtactcatcataatgtcttgacctccagctctgaaacaacatatttcctgagagatgctgattgtattttgtgaggttctgcagggtcaagtaaattgaggatgtctttattctgcatttgactaatctgaattagatagtcttagccattaaaactttagaaagcacataatgaccaattacaagtgagagaatttttttcaataatgctttatattttctaagtaccgatacagatgttttattacatttaaaacatgattgccctaccacttcacttatattttaaaaactaagttgccatcttgtaaaaataaatacatggatatcatttacaagtgatatcagttaatacctaatgtgaacatccattgtgtactgagtctatgaaatactactagttactatgaaaatgtgagattcaccgaatcgggtggagcatcaactttattatccacataggttacccatttcttatatcatagctttggttgtataatttatttcaacagagtttagttaaacattttccactgttattaggtactgccactctacattccagtaaatattgccaccatgttgcagaacaatttttggacaaccaggcatatctttggagttgaactatgtggaggtactactggtgctgtgagggatcacctgtaaacctggcagttttaggtggcctctagacgttatagggtcaagggagaaattttttttgttcttgttgtttaatactgtgagtacatttaaatgctcatgtaaaagagccaacttagagggagtggttgaagacacaagagagataagagctgattgttatggcaaggtctctggctaggcagaagtgaatgggtcgaagagaacagatttaggaactgaccttctatcaggagaacaatatttcttccaatgtcatgggggaacatagagactcagggggtctgtaaccatgtatggcccccaaaggactggacacatggtgagcaactatggtaggatgaagggaggcatgttaggaaatgtccagctccgaggcctccacgtgacccctaggtgagaagctgccatgattccttaatagggagcaacacaaagactaaaatgatggcaatgtaagggttaaggaaaaggtgattttaaaagcttcttgagggtaaagtccatctgtgttcacttttgtgatctttgttgcatccttctcaatcttgcatattgttgatctcaaataagtttatggtatttattatgttcaaaaaagttacagtttcttaagtttcttctattttcttaaggaaggaggtgataggatggagggggcatgatgccaacttgactctcctgcttaggacttgcccttcttttaaatggtgaacacagagttacattatttaatgcataatgtgaaagtgacagaggccctgattattggagtataaaattttatattattatggaggctaaaaagtacatgactggactttttcatacaataattcaaagtaagcccatggaacatcctcttcaaatgaagttgacgtacgtctcatctccctggattggatgcccaaccctcacccttgaaagcagcttgtggataactcagggcaaacagaagcagaaccctcatgaaccttctctcttctggaaattttggatggcgttacagaatgaggcaaaaataaagttaccttcttctcttttcttggattaaagatcccagagccattctcctctgtgttctctacttggaccttgtatagtgtaggatatagccaggaactaaggatcctcggttgactcatagtcggcagagggtgttatggccctcctgagagagtgaccttgaggagagaatctattcagatggttttatgacaagaccaaagtaacatttcttagttacctcttagccagagtttagtgttaagtttgccctgaagtatagttttcaaaataatgagatcaggcatatgctattttgactaagtagaatacccaataaaataagtcattcaagttgtgactgaaagttcggatggtccttatggaatcaaggtgaccaaataacatgatactaaaccagaagtgagtcatgttgtttatcatactgtttttataaattttgtataatacaaccccatacgaccccacacagttcaaaacagtagtggttactcactccatggagaagatgtcaaaagtaaaaggaataatacattggttatgatgtctgaaattgggcacataagcatttagttttgttggtgaataatgttcagaatgaaaattgacacactctttggattatcaagctttttaaaaagtataattaatcagttttttaatgaaatatacagaaatataatggcagctcttctattagtgaagtttcctgaggcagctggattgattgaaggctttacctggttcatttggattctacttgtaaagcatgaagaaaccaactttagggtcaggaattttccataagtcaggttttttttaaaagccatataatcgatgcagatatcaaaacattaagatgagataaaaatagcttttaatcaagtaagttaaattaaataactgttaaggttcaaatcatgaattaaatctagatgtttggcaaagacaaaaatctttataaaaggataaaatagtctgggaataaagtatttgtcattcccatatcaaatgagaacaaaactaataattttattaactttaggtttttattgtattaaataacatcatttttatttactttatcacaaggtatatttttctttattatatgtctttgtagaaaacctagtaacattcctgtgtgactgaatagattaatcacagatatacccatctggaaaaatgcatgctactataagagatgagtgaaatatataaaatttatattttaattcttatgctaattagttaaatgggggaagatgtatgtccagaatatttgctcttaataggacatcgtagtgaaaaccattccaatgatgatgactaataaatgtgtatcttcaacattgtataatgcccaggaatatttccaaataaagaatttctaggtaagatgtttaacaaatatatgatacttttgttttctgggtgaatgttcaaactaatttcctggggatcattgtgctcagtacttatagtatcattaatattattgttgacatataataataaccaaaaatatcctggtcagataggttttttcttttttagctgattcataatcattgtacatatttatggggtacagaatgatatttcaatatgcgtatacaatgtgtaatgatcaaatcagggtaattagcgtatacatcacctcaaacatttgtcatttctttgtgttttgaacattgaaaatcctctcctctagtttttgaaaatacacaatggattatagctaaccatgtttacccaacagagctacagaacaccagaactcattcctctcatctagctataattttatatctgttaaccaactccttcccatcctcctcttcccccatccttcccaatctctaatacccacaattctactttactaccatgagctgaattttttattttagctccctcttatgagtgagaatgtgcggtatttatctttctgtgcctgacttatttcacttaacataatatcctccaggttcatccacattgctgagaatgacaggatttcattatctttttgtggctgaatagtatttcattgtgtgtatataccacattttctttatctatttgtctgttggtagacattaaggttgattccatatcttagctgttataagtagtgccgcaataaacatgatggtagaggtatccctctgatatattggtttcctttcctttggatagatacccagtaatgggattgctacatcatatgttagttctatttttagtttttaaagaaatttccagattgttttccataatggctatactaatttacatttgcaccaacaatgtataaaagttgccttttctctgcatctttgccatcatttgttattttttctttttcataatggccattctaactggggtgagataatatctcattgtggttttgatgattagtgatgttcagcattttctcatatacctgttggccatttgcaagtcttttgaaaagtgtctattcagatattttgcccacttttgaatcaccttatttgtttttttctgttgaattgtttgagttccttgtatattctggatattagtccattgtcaggtgaatagtttgcaaatattttctcccattctacaggttgtctcttcacactgttgattgttttcttttctgtacagaaactttttagtttaatatagtcccatttgactattttcgtttttgttgactgtgcctctgaagtcttagccaaatagtttttatttccttcaaatagctttggcatttgagtaccacttcgctcattccagaaaagcaaccacccaaccaaaagaataggtttttaatttttttttaattattattatactttaagttttagggtacatgtgcacaatgtgcaggttagttacatatgtatacatgtgccatgctggtgtgctgcacccattaactcatcatttagcattaggtatatctcctaatgctatccctcccccgtcccctcacctcacaacagtccccagagtgtgatgttccccttcctgtgtccatgtgttctcattgttcagttcccacctatgagtgagaatatgcggtgtttggttttttgtccttgcgatagtttactgagaatgatgatttccaatttcatccttgtccctacaaaggacgtgaactcatcattttttatgtctgcttattattccatggtgtatatgtgccacattttcttaatccagtctatcattgttggacatttgggttggttccaagtctttgctattttgaatagtgccacaataaacatacgtgtgcatgtgtctttatagcagcatgatttatagtcctttgggtatatacccagtaatgggatggctgggtcaaatggtatttctagttctagatccctgaggaatcgccacactgacttccacaatggttgaactagtttacagtcccaccaacagtgtaaaagtgttcctatttctccacatcctctccagcacctgttgtttcctgactttttaatgattgcctttctaactggtgtgagatggtatctcattgtggttttgatttgcattcctctgatggccagtgatggtgagcattttttcatgtgttttttggctgcataaatgtcttcttttgagaagtgtctgttcatggccttcgcccactttttgatggggttgtttgtttttttcttgtaaatttgtttgagttcattgtagattctggatattagccctttctcagatgagtaggttgtgaaaattttctcccatgttgtaggttgcctgttcactctgatggtagtttcttttgctgtgcagaagctctttagtttaattagatcctatttgtcaattttggctttggttgccattgcttttgatggtttagacatgaagtccttgcccatgcctatgtcctgaatggtaatgcctaggttttcttctagggtttttatggttttaggtctaacatttaagtctttaatccatcttgaattgatttttgtataaggtgtaaggaagggatccagtttcagctttctacatagggctagccagttttcccagcaccatttattaaatagggaatcgtttccccattgcttgtttttctcaggtttgtcaaagatcagatagttgtagatatgtggcattatttctgagggctctgttctgttccattgatctatatctctgttttggtaccagtaccatgctgttttggttactgtagccttgtagtatagtttgaagtcaggtagcgtgatgcctccagctttgttcttttggcttaggattcatttggcaacgcgagctcttttttggttccatatgaactttacagtagttttttccaattctgtgaagaaagtcattggtagcttgatggggatggcattgaatctttaaattaccttgggcagtatggccattttcacgatattgattcttccgacccatgaacatggaatgttcttccatttgtttgtatcctcttttatttccttgagcagtggtttgtagttctccttgaagaggtccttcacatcccttgtaagttggattcctaggtattttattctctttgaagcaattgtgaatgggagttcactcatgatttggctctctgtttgtctgttgttgctgtataagaatgcttgtgatttttgtacattgattttgtatcctgagactttgctgaagttgcttatcagcttaaggagattttgggctgagacgatggggttttctagatatacaatcatgtcgtctgcaaacagggacaatttgacttcctcttttcctaactgaataccctttgtttccttctcctgcttaattgccctggtcagaacttccaacactatgttgactaggagtggtgagagaaggcatccctgtcttgtgccagttttcaaacggaatgattctagtttttgcccattcagtatgatattggctgtgggtttgtcatacataggtcttcttattttgagatacgtcccatcaatacctaatttattgagattttttagcatgaagggctgttgaattttgtcaaaggccttttctgcatctattgagataatcatgtggtttttgtcttcggttctgtttatatgcttgattacatttattgatttgtgtatattgaaccagccttgcatcccagggatgaagcccacttgatcatggtggataaactttttgatgtgctgctggattcagtttgccagtattttattgaggatttttgcatcaatgttcatcaaggatattggtctaaaattctcttttttggttgtgtctctgcctggctttggtatcaggatgatgctggcctcatcaaatgagttagggaggattccctctttttctattgattggaatagtttcagaaggaatggtagcagctcctccttgtacctctggtagaattcggctgtgaatccatctggtcctggactctttttggttggtaagctattgattattgccacaatttcagatcctgttattggtctattcagagattcaacttcttcccggtttagtcttgggagagtgtgtgtgtccaggaatttatccatttcttctagattttctagtttatttgcgtagaggtttttgtagtattctctaatggtagtttgtatttctgtgggatcattggtgatattccctttatcattttttattgcatctatttgattcttctctctttttttctttattagtcttgctagcggtctatcaattttgttgatcttttcaaaaaaccagctcctggattcattaatttttgaagggttttttgtgtctctatttccttcagttctcctctgattttagttatttcttgccttctgctagcttttgaatgtgtttgctcttgcttttctagttcttttaattgtgatgttagggtgtcaattttggatctttcctgctttctcttgtgggcatttagtgctataaatttccctctacacactgctttgaatgtgtcccagagattctggtatgttgtgtctttgttctcgttggtttcaaagaatatctttatttctgccttcatttcgttatgtacccagtagtcattcaggagcaggttgttcagtttccatgtagttgagtggttttgaatgagtttcttaatcctgagttccagtttgattgcactgtggtctgagagacagtttgttataatttctgttcttttacatttgctgaggagagctttacttccaactatgtggtcaattttggaataggtgtggtgtggtgctgaaaaaaatgtatattctgttgatttggggtggagagttctgtatatgtctattaggtctgcttggtgcaaaggtgagttcaattcctgggtatccttgttaactttctgtctcgttgatctgtctaatgttgacagtggggtgttaaagtctcccattattattgtgtgggagtctaagtctctttgtaggtcactcaggacttgctttatgaatctgggtgctcctgtattgggtgcatatatatttagtatagttagctcttcttgttgaattgatccctttaccattatgtaatggccttctttgtctcttttgatctttgttggtttaaagtctgttttatcagagactaggattgcaacccctgcctttttttgctttccatttgcttggtagatcttcctccatccttttattttgagcctatgtgtgtctctgcacgtgagatgggtttcctgaatacagcacactgatgggtcttgaccctttatccaatttgccagtctgtgtcttttaattggagcatttactctatttacatttaaagttaatattgttatgtgtgaagttgatcctgtcattatgatgtcagctggttattttgctcattagttgatgcggtctcttcctagcatcgatggtctttacaatttggcatgtttttgcagtggttggtactggttgttcctttccatatttagtgcttccttctggagctcttttaggcctggtggtgacaaaatctctcagcatttgcttgtctgtaaaggattttatttctccttcacttatgaagcttagtttggctggatatgaaattctgggttgaaaattcttttctttaagaatgttgaatattggcccccattatcttctggcttgtagagtttctgccaagagatctgctgttagtctgatgggcttccctttgtaggtaacccaacctttctctctggctgcccttaacattttttccttcatttcaactttggtgaatctgtcaattatgcgtcttggaggtgtgcttcttgaggagtatctttgtggcgttctctgtgtttcctgtatctgaatgttggcctgccttgctagattggggaagttctcctggataatatcctgcagagtgttttccaacttggttccattctccccatcactttgaggtacaccaatccgacatagatttggtcttttcacatagtcccatatttcttggaggctttgttcgtttctttttattcttttttctctaaacttcccttctcgcttcatttcattcatttcatcttccatcactgataccctttcttccagttgatcgcattggctcctgaggcttctgcattcttcacgtagttctcaagccttggctttcagctccatcagctcctttaaggacttctctgtattggttattctagctatacgttcgtctaaatttttttcaaagttttcaacttctttgcctttggtttgaattttctcctgaagctcggagtagtttgattgtctgaagccttcttctctcaactcgtcaaagtcattcttcgtccagctttgttccattgctggtgaggaactgcgttcctttggaggaggagaggggctctgctgtttagagtttccagtttttctgctctgattttccccatctttgtggttttatctacttttgatctttgatgatggtgatgtacagatgggttttgggtgtggatgtcctttctgtttgttagttttccttctaagagacaggaccctcagctgcaggtctgttggagtttgctagaggtccactccagaccctgtttgcctgggtatcagtagcggtgtctgcagaacagcggattttcgtgaaccgcaaatgatgctgtctgatggttcctctggaagttttgtctcagaggagtacttggccgtgtgtggtgtcagtctgaccctactggtgggtgcctcccagttaggctgctcgggggtcaggggtcagggacccacttgaggaggcactctgcccattctcagatctccagctgcatgctgggagaaccactgctctcttcaaagctgtcagacagggacatttaagtctgcagaggtcactgctgtctttttgtttgtctgtgccctgcccccagaggtggagcctacagaggcaggcaggcctccttgagctgtggtgggctccacccagtttgagcttcctggctgctttgtttacgtaagcaagcctgggcaatggtgggcgcctctcccccagcctcgctgccaccttgccgtttgatctcagactgctgtgctagcaatcagcgagactctgtgggcgtaggaccctccaagccatgtgtgggatgtaatctcctggtgtgccgtttttttagcccgtgggaaaagcgcagtattcgggtgggagtgacctgattttccaggtattgtctgtcacccctttctttgactaggaaagggaactccctgaccccttgagcttcccaagtgaggcaatgcctcgccctgcttcggctcgcacacagtgtgctgcacccactgtcctgcgcccactgtctggcactccctagtgagatgaacctggtacctcagatggaaatgcagaagtcacctgtcttctgcgtcgctcatgctgggagctgtagactggagctgttcctatttgtccatcttgtctcttcctcgatttttttttcaggtttttaatttttttaattcatattttgatattcttcttaatgctagatgtaagtaaattagatttttccctgttaatattttataaaccattttttcttttaatttagtgagagtgacagatagaatgatttactctgaattactcttcctcttgaaagattaaagcttgctcttaagtaaagtttgttatgcctatctgttttgtcttcggtttatttttttccatggagctgcttcttccttcttacaaaatgaagttctggaggaccaacaggtcactacatgtattcatagttatataaattctagcaatggtaacagtttggctcatgttggggcctggctacatgttcttcattcctgtttaataaatctcatctttctaccatatgctagtaatatatggctggaatgctggtatgggaattactcccctctttgctgaaatagttcatctcttgtgtccttttcccctttttattcttctattcttcttagcctaagtgatggttgtgattgaattcagaagtttgatattcctactcggttcatgtccacccaaaagcagagaggagcccatcatcatcatttgttttgaatctgaatcccaagcaggaaaaataactccaaggctcttacttaggctgtcgtgtctgttctgtcatgcggtgagtcagcaacactgactgcatttattcttctgggaattgttcttctaggagctgtagtagtcatggtacctccctgcaggagttcatgaattaataggactcatagtgcaaagtttctctgagaattttctataacacaaactccttaacttcctggtgggtaatgttttctgggtgttttttctgttttctgtttttttttttttgtcatttcttctttagtaaaatgaaaattgcaagtagaaaagaaactaaaaatggatttagtgtgaggacaggttccttttcctggcaggattgtagaacactggtattcagttgactgtttacaatgaatatatcttctggttggtcatggccagaagagaaaatgtcattggtttgtgcccaagcaaattgattattaaaatacgttgaatatgaccccatggttgcaaacatcccttttcttagtaattcttagagatgaagaaagtcttttatctgttttctatttcaactttctgggtaatctctatcctttctttttgataagtctctgtcttccctctatcagtgtgaataatgttactattgaaaaactggttccctagctacctcagtcctggggtcttaaggtttcttcaaaacgtgacagtcatgttaaaatgaaattctctgaatttatttagagcactgtttgtaaaagtgtaagtgttattatgcagccttgctttcctacctacctgaattctctcccctactctccccaactcatattgccagcagtgggtagctggcaggatgtttgaaagatttcttcttcacaattcaaaaggcttggtcgagtgacaggattcatatcccaaacctcaacatcacacaatactcccatgtaacaaatctgcacatgtacccactgtattgaaaataaaattaaaaaaactaaaaaaaagcaaaaaagcaaaaaaacaaaaaacaaaacaaaacaaaatccctggtatatattaagagtcccagtgacctacttcacttgcaaattaatggccatctagagtgtggagtttggttgaatgatttatactgcattgtgattctaaaaattaattatttttaatttctttgatactctagatcagttttctaaggtaaatgtgaagtacatcagtgactccaaactcaattgaggtctcccgattttcttggactgactatgtatattttaaagaattatttactttcatactttgccaagacccagacagaaagaagctttcagtgttcgtggcagcagaaaagaatactaataagtgttagtcatccacagtaaattaaaaatataataataaaggaaaattaaactgctgtgtgtttgggtgtttgctctatcaccataaattcacaacctcatcttctagtctctgaaaaggagtgggtgtggcaggaagcatttgtgaaattccattagcatttttagagacaattactccactaaatgattcagaattcagctcctagcttctaagattctacttaggcttatgaagcattttattctgcaacagagtatacatataatgtagaattcctaggattgaaaaacttgttagcttccaacccaaattctcttacttttagatgagaaaatgctgatgattggcctaaagtcttatatctactggtggaggagtggaaattcactcgtttaccttcgcactggaggtagattcaaaatacttcagaaacgatgttagactagagcataatgcttggccattgataaataaataaatgaatataagatgttgtgccctgagattcagaattggcagcaagaatgtgggtattataaaggtatatttttcttcttgccttattattgaataagagtacttgaaaatggatgaaggcaaccagatgttgagtcagatttcctgagctttgaattttggacctgcattcatttcatttctctaggaaggttgcccccctctttatttgttcagtgcttataccagattttattatactggagatttctaaagcctccaaccaaggaagattccctgacttctgccttgctgctgcaccacacaaataaccatatcaatttatattgcactattctcaaccccacaaactccatttagacctaacagctatggacagtggccctaatttcctaggaacatgatcattttgttcttgtttggtgtctatgccaagctccaaatcacaaaaagctgttaattccaattaccttttgcaaaatccattttgaagtcttctcacagatggatgtatttaaaacacctagaaggttaacatcctttgtgaggcctcagctttgacttagaaaaagctcatgccacagtgtgtatgtgtgaacctatttcctaagagctgatatatgcccatggtgtctcactgcagggctggtgataaatgatgaaaccatttagtgcataaactcatataacctttcagcagaatcaataatttagttgcaatttagttgcatacctaaaacaatgcaaggttgaagaaccctgagaagagtggtagctcctgatgacagaaataggagtctcaggtattcttcttttgtttcccaagtggtatcaagcatgtgtctgactcactggtgctattttacattgtgaaggaagtatggatgagggaaggcaaaaccagtgcaaatattctagatccacttatttccttcccgctttcccttcctctcttcccctccttcctttcttcttctcttttatctcttccttcctaaattaatatttttgagggtaggtaaaatagctatattacttaaaagtcaaactttataaaaaggtaaagcggagatgtctgtctcccaatcccatctattcctccttcaccctgttccccatctatgagaaattatatttattagtgtcatgtttattttttcagtgtttctatatgtaatactcattatatgttatacaaacacaaatatacatatacataatttccttccatttttatcaatttccttcctttctcactgtcctgctcctagctttaattttaccaattartaaaacatactaaagatttttttcatatcagtgcatgaagcttttcctcttttttctttcaactgcataatattccactatgtggaaatatcatggtttatttaaataaattcttatcagggaatatttgagttgttccagggttttctttctttctttcttttttgctgtgaaaaacaatgttacagtgaataactaacatcatttctcatttcatatgtgtacaaagtatctgtgggatagagttccagaactgaaattgctgcttgaaagggtaaattgtttctgtggatttgtagaaatttccagatttccctttatagtagttacaccattttataatcctacagcaaagtctgaaagtgtatttttcacacatcctttcaaaaacattcaaactttggatttttgtacatctaattggtgagaaatgatatacttgttttcattttcaatctattcttatagatgaacctggacatattttcataagtttaataaccatttgtttttctttctcggtaaaccgtatttcctttgctaatttttcactgggcatttggtgttgatttctgtcaaatctttacaaagtagagaagtttgtactttgtttatgatctgagttgcaaatacttttattccttccttgacatttatcatttgccttaacttatggtgaatttttaccatgcaaatgtttttgattttcatgttgttcagtatgtcaatatattttatattcattacattcattagtggctaaaacttcccaaatgttggtaggaatatggatgtctagattagtgaggctcaaatgctccaggcaagatcaacgcaaaaaatacttttcctagacacattaaaatcaaattgtcaaaatcaaagacaaagtgagaattctgaaagcagcaagagaaaaactactcatcacatggaagggtactcacaaaggctacaagcagatttctcagcagaaactttgctgggcaggagggagtggaatgatgtattcggagtactaaaagaaaaacaaaactgccacataagaataatgagtctgtaaaagctgtactttagaaatgaagagacataaaatcattcccagagaaaagaaagctaagagagtttatttccactagacctgccttaagagaaatgccaaagggagttcttcaagttgaaatgaaaggacccgaagtaacatcatgaaaacacaggaaatcccatagctaacatcatactcatgttgtaaagccaaaagcttttccattaagatcagcaagaagacaagggagttcactctcaccacttctattcaacatagtactgggagtcctagccagggccactaggcaagaaatggaagtaaaaaatatccaaattgtaaaggaagaagttaaattgtctctatttgcataaggcatggttttttataggaatctctaaaaacttcatcaaaaaacttaaaattaataaattcagcaacgttgcaggatacaaaattaacatacaaaatccagttgcatttctgtacattaacaacaaactatttgagaaagaaattacaaagacagtccgtttacaatagcatgaaaataataaaatacagaagaataaatacaaccagrgatgtgaaagatctgtacactgaaaactataaggcattgatgaaagaaatttaaaaatacacgaatgaaaacatattttatgtctatgtattagaagaattaatattgttaacatgcctttactgtccatgtaatatacagattcaacccctatcaaaattccaattgcatttttatataaaaatgtgttgggtacattataattctattctagctatttgaaatatataataaattattgttaactatagttttcctactgtcctatctaatgctagaacttattccttctatttaaccatatttctgtatctattaaccaacttccaggctgtgtgttgacagtttttctaagagttttcccaaggcaaagagtaagtggaagtcaatcttaaatcactgtgtctggccgtgacccgtgataaaagatttaatggaaaatttcagtttagatgagggtaacagacattcatcagatactgggtgctggagatagattcagagctaagtaagaaatcctatttttgagattaagtaatctcacttcacacccagtgacactgcaactgttgattaagagttttccagtctctttttatccccgttagcctacaggagcaggtaaatatctagttccttctgggtctgaagattctgtaaacttaaaaggagagatcctttctgatttgtatattattggattttctaatgtccatcacagcaccggatttaacactcacacacatgcacacacacacaggatatattgaatgagtaaataaataacagacaggagagttgttactaactgatctctaatattaccttattgttctaataactgtggatttgatataactttgggagcaagcaaggtatcagtcttaaagtatagacaaatttactatgtcacctcagatactcaaatagagaatatcctatgcccaaatggcaaggctgaattgayccaagtgattaagtcatactcttaaaactgtataacctaataaccttttattaagaataagttcagaaaaacagttcacaatttctttttacttaaattgtatatattatatgtgcagttttcagatgtgaatgggatttgagatcagaaaggcagggcttcatactgcatttctccaacttgctctctatttgtcctttagcaaaagacaatctttccttctttactttttatttgttaaacacacacacacacacacacacacacacacacacacacacacacacacacacaacttcatagcatccaatgagcagtatctaggtacacggccaatgcaaagcactcattttcttatttctccttcacatgtttttcattcctattttccatctttgccatggacaagacttcattccctagctgtggctttagaataacagtatgactagatcatattcatttttagcttagcacattacctcccatttagttgaaatgaatatcaacaagaattcacacttctaaatgcttgaaagcacaatgtccatccaagatccaagtgactgaaataataagagccttgttatatgaagaaatacccattttcatgatgttttctgaggcattaactgttactctgaaaagaaagaagagtgttggtaagacttgggtatgagataaaacaattagatatttgcttataaactggaatgaccttgtaaatggcccaggagcaatgtaattaaataccataaaagctcagaattccattgtgccccctggaaacatcataattgcctcagtcattagctttcagggtttcagccttaaaccaggatatttctagtctcatcaaaactatacattagcattcagtgacttgtaagagtaaacttccttctagatagtcctgtgtgcttatgaagtacatccaaatgaacatatgacatgaggtggagtacaacttaaagttgccttctttcatcctatatatttttgtttattcttaatgtatcgtgaacttcagtagagagcaaacaagttgtctttataatttgaagttttgctttctctttttgaaagaaaacgcataatttggagattccatctgtgaaaaaaacttaattaaacaatgttaatttttaaaattctattatgtataaggtgtaaggaaggggtccagtttcagttttctgcatatggctagccagttttcccaacaccatttattaaatagggaatcctttccctattgcttgtttttgtcaggtttgtcaaagatcagatggttgtagagtgtggagttatttctgaggcttctattcttttccattggtcataaaaaccctagaagaaaaactagaaaataccattcaggacacaagcatgggcaaaggcttcataactaaaacaccaaaagcaatggcaacaaaagccaaaattgacaaatgggatctaattaaactaaagagcttctgcacggcaaaagaaagtatcatcagagtgaacaggcagcctacagaatgggagaaaatttttggaatctatccatctgacaaagggctaatatccagaatctataaagaacttaaacaaatttacaagaagaaaaacaaagaaccccattaaaaagagggtgaaggacataaacagacacttctcaaaagaaggcatttatgtggccaaaaaatatataaaaaaaagctcatcatcactggccatcagagaaatgcaaatcaaaaccacaatgagataccatctcacgccagttagaatggcagtcattaaaaagtcaggaaacaactgatgctggagaggatgtggagaaataggaatgcttttacactgttggtgggagtgtaaatcagttcaaccattgaacttgtagatagacaacttgtagatagacagattccattgtggaagacagtgtggtgattcctcaaagatctcaaaccagaaataccatttgacccagcaatctcattactgggtatatatccaaaggattataaacaattctcctataaagacacatgcatatgtctgtttactgcggcacttttcacaatagcaaagacttggaaccaacccaaaagtccatcaatgatagactggataacaaaaatgtggcacatatacaccatagaatactatgcatccataaaaaaggatgagctcttgtcctttgcagggacatcgatgaagctagaaaccatcattctcagcaaactaacacaagaacagaaaaccaaacaccacatgttctcactcataggtgggagctgaacaaagagaacacagggacatggggagtggaacatcacacactggggcctgttagagggtgagggggctggaggaaggataacattaggagaaatacctaacgtaggtgatgtgttgataggtgcagcaaaccaccatggcacgtgtatacctatgtaacaaacctgcacgttctgcacatgtatcccagaacttaaagtataataagtaagtaaataaataagtaaaaagaaatatgttaaaaaattatattatgtagatatttttgttatcttgcttcatgccaagtgctttcataaatgctagacttctatttgtacattttgctttcatgagggtgaagacaaataaagagtgatcattcaaaaatattaatgtacggaaaagtaaagtaactgtagggcttccataacaaaagtacaacaaattgaatggcttaaacaagagaaatgtatgtattgtctcacagttctggaggctaggagtctcaaatcaaggtgccagtagcgttgattccttttgagtaagctgagagaaagatctgtccctggcctttcttcttggcctgtagatagacaacttccttccctgtatgtctcttcacattgtcttccatctgtgcacctctctgtgttcaaataccctccaacttaaaaaaaaaaaaaaaaaaaaaaaaaaaaagcatgtcactcacattgggttagggcctaccctaatgatttcatcttaacttgattacctctgtaaagactttatctccaaaccaaatcacattctaaagtactgggggtgggtgaggatttcaatatatgaattctggggagacccaaagcaatccataaaagtagccatttaaatagaagtatttttagtcttttaacttaaagtctctctacartgttaaaccatgccatcttaatgtgtgttatttagaataatctaaaaaattatatattttcattaacatttaggttaccttcaactttgtttttgatgttttgtaagctgcccataagtgactttaatcactcactgtataccactgacagatcatttctcatgaattcagtgatgtgcactttgagactcaggaaagagggaaacttggccttactaaaatcatatagttagtatgtggcagagctgatattcaactctacatcttgctgcctccaaagttagtgatatatgcatggtcaatattattttaaaatactcatttagtgcttgcctttttaataaaatgctgattttcctgattataagtgtaacaggtgatcactgaagaaagtttaggaaaaaactcaaaacttattcagattaatattaaaattactcataatttcaccatccatagataattgttggtatattatcttacagaaatcgtttataaacatttttattattcaatttatatatttatatctgcagaactacatatgtagttttacttaccaccaaaacttgttgcaaaaaaacatttttacatttgcccagttaaaaatcaccattaatcttagtggagaattattttttaattatttaaaataagaatattttcatttttgcatttttctagagagagcatggcataagccttgtaaagttactcctgaaatttaattttcttttcttatttcctactctctagtcctaagagatgagtggttcaagacagagtgggggtaaggcaacagtcagcactttgtctttgctccactctctggttcatctctgaagcctgatttctctacccaggcatgaagatacttgaataagtagccttttccatccttttgccctgatatgaaaactggtatatctcttgagagaagagcctcaaaaaataatctgagataggaacaagtggaaagcagagatagtctcttctttttaattcacccctcctttggtcacctcctgaatataaaaagaaggacccagaacaacatggtgtccacggcaaccatatctaggtattgcagaattttagagaacccatgaaatcctttcaaaggataagcaggggatctaaatcgtgtcagatgtatagcacccagcacagagctgagggcagaatatgtgcttcatgcatcttttttgtttgatggcaatatcacttcaaggcttcttcagaaagattccatacctacctctccttctcacttctttataatctgtaatttacacacttacctcacaacttttctgggacacattcaatctatcagatatgtaaccacttgtaagctgttggtttgattctgcaagttttggtgtggtaagactggaatcgtacaaatgatatgcttggatcaggtagtccctcgtggtgagtcatgtctaggctcaccccgatgcagtccagtcatgcttcccctatgacttagttgtttgtattgtccccagagtcaagagtgtcccaagtctatgaatcttgctccagagcattgtaatttagcctacggccttgttcacacaaataaatctggcattagttccagctggcagtgatatgggcttggtgattcacttttaggcctcattggagtagagttaaagaaacttcattgtcagaaagagtgagatctctaccatgtgtcttctaagagtgttcagagtgttttttttttttagcgtgcagaagtcctaactttattcctagtaccctccattctctcttttttttattgaaacataagaattgtgcatatttacagggtacatgtgatatttttatacatgtatacaatgtgtaataatcaaatcagagtaattaggttatcagttacctcaaacatttatcctttgtttgtgctgggaacattccaaatctcttcttctagctattttgcaatataaaataaattactattgccaccttatgatactatcaaacactataacttattccttctatctaactgtatttttttacacattaaccaaattctcttcatctcctccctgcttcccttcccaatgtctggtaaccatcattctactttccaccttcatgagatccacttttttagcttccttatatgagtaagaacatgcaatatttgtctttttgtgccatcgcttaacgtaatatactctagttccatctatgttgttgcaaataacagaatttcattgcttttttatggctgaataatactatattgtgtatatatttcacattttctttttttttttttttttttttttttttgagacagagtttcgctctgtcgcccaggctggagtgcagtggcgcgatctcgactcactgcaagctccacctcccgggttcacgccattctcctgcctcagcctcccgagtagctgggactacaggcgcgcgccaccatgcccggctaatttttgtatttttagtagagacggggtttcaccgtgtcagccaggatggtctcgatctcctgacctcgtgatccgcctgtctcggcctcccaaagtgctgggattacaggcgtgagccaccgcgcccggcccacattttctttatccattcatctactgataggtatataggttgcttccatatcttggctattgtggatagtgctgtaataaacatgggagtgcagatatctttttaatacagtgatttcattttttaaaatgtattcccagcagtgagattgctgggtcatctgtagatctatttttaattttttgaggaacctccatagtgtttttcacaggagctgtactaatttacattctcactaacagtgtattagcatttctctttctctacatccttgaaagcattgtttattttttgtctttttgataattaccatttaaactggggtgggatgatatatcattgtgtttttcatttgcatttccctgataattaagtgatgttgaggtttttttaaatacactcattagccatttgtatgctttcctttgagaaatgtctattcatatccttctctgcttttcaatgggattatgtacttttttaccttgtatattctggatgttagtcccttgtcaaatgaatagtttgygaatattttctctcatttaacaggttgtctcttcactctgttgatcatttacattgttgtgctgaagctttttagcttgatgtaattccattgtctagttttgcttttgttgcttgtgtttttgaggtcttacctaaaaaatctttgcccagaccagtgttcttccaattcatgagcatgggatggatatcttttaatcttttgtgtcctcttaaattattttcaacagtgttttatagttttcattccagaggtcattcacttgtttggttaaatttattcccagatgtgtttttgtgtgtgtgtgtaagtattgtaaatgggattactttcttgatttctttttcagattgttcactrttggtatatagaaatgttactgctttttgtatgtttattttgtatattgcaactttaatgaatttgtttttcagttctaacaggttttggtygagtctttaggttttcctaaatataggatcatgtcatctgtgaacaatgatagtttgactttttcttttccaatttagatgcactttgtatcgttctcttgcctaaccgctgtgataggacttccagtgctatcttgaataacagtggtaaaagtgggcatcattgtcttgttcagatcttggaagaaagaatttccatttttccccattcagaatgatgctagctgtggatttgtcatgtaagatctttattgtttcgaggtatatttcttatgtatccagtttgttgacagttattatcatgaaggaatgtcaaattttatcaaatgctttttcagcatctattgaaatgagcatatggtttttgtccttcattctgttgatacaatgtrtcacattgattgatttacatatgttgaattatccctgcaaccctgggataaatcccacttggtcataatgaatatttttaatgttttgttgaattcagtttgcttgtattttgatgaggatttctgcatctgtgttcatcactgatactgacctgtagttttcctattttgttgtgtttttatctagttttggcatcaggataatcctggccttttaggatgagtttagaagtatagtttagaagtattcccttctcttcaatttttttgaaacagtttaaagagaattggtataggttattctttaatcgtttggcagaattcagcagtgaagctgtcagatcctgggctttcctttaataggaggctttattactactgcagtctcatactcattactggttttcaggttttctcttttttcatgggttcaatcttcatggtttgcatgtgtccagaaattyatccatttcttttaggttttcctatttgttggtgtatcaattttcataatcttgtctgttgcttttttttttgtatttctgtagtatcagttgtaatatattctttttcatctctgactttattttttagacttctggttggtgtagctaaaagtttcttgatttttttttcaaaaaaccaactacattttgttgatcttttgtatttttgtagttcaaattttatttatttatgctttgatctttattatttctttccttctactaattttgagtttgattgttcttgcttttttagttccttgaagtacaatgttaggttgtttgtttgaagtctttctactttttgatgtaggtgttgattgctacaaatttccatcctagaactgcttttggtatatcctctaggtttttgtatgctgtatttccattttcatctgtcctaagaaaattttttaaatttcctttttaatttattcattgaccaatttgtttttcagtagcatgttgttttctttccatggatttgtacagtttccaatgttccttctcttattgctttatagttttattcaattgtggtcagaaaatatacaggatatgattttgacttttttgactttttaaaacttgttttgttacctaacatatggtctatcctagagaatgttccatgtgctgttgagaaaaatgtgcattcttcagctatggggtaaaatgttctgaaaatgtctgttaggtcaatttgatctagagtaaagtttaattctgatgtttctttgttgattttcttgtctagattacctatctgctgccaaaagtggagtgttaaagtctcctactattgccttctctgttgtttttaactgtccttgacttaaggtctgttttatctgataattatagctttacttctgctctttttgtttgtttgttttccatttgcttctaatatctttttaaatatcttcacattcagtttgtgaatgtctttacagatgaagtgagtttcttgtagacagcatatagttggatccttttaaaaattcattcagccactctgtcttttaactgaagaatataattcatttatattcaaggtttgaatattattgatatgtaaggatttagtattgctatcttgttacttgttttctggttgttttgtagaatcatttctttctttttctctctctctcttactttcgtttttgtcacaaaataattttctctattaggacatgttgatttctggctacttatttttagtgtatctataataggtttttgctttgttgttactacaaggcttataaaaatatatttataacaggttattttaaactgataatagtttaactttgatgcaaataaacaaaaataaactctacattgtaataccaccccctcccacattttgacttattgctgtttcaatttacatatttttatattgcctaactcttaatcaattgttgagattatttaatagttcttccttttagctttcatacttaggatataaattgtttacttaccctaattatagtattatagaattatgcatttttctgttttttaatagtgaatttcatactttaggtttttttgttttgttttttgttttttgttttttacacattagcatccatttttttttcagattgaagaattccctgtagcattttttgtaggcgaagtgtcgtgttgtaaatttcctcagcttttgtttgtctgagaaagttttttatctctttttcctgtttaaaggatagttttcctgggtatagtattcttagctggctttttgtatttgtttccttcagcactgtgaatatagcatctcacttcttttggtctgctaagtttctcygagaaatccgctgaaagccatattagagatcagttgaatgtaatgtttcttttctcttgctgcttaaagtattctttctttgtttttgatttttactaatttcattataatatatctgggtagttttctctttgagttgaatttgtttaatatctttgagcttcctgcacttggatagtgttggttttctccagatttcagaaatttcagccgttactttttgaaatatgctttctagaccttttcctcttttacataatatctgttggaaatttctattatgtggaagttagtttgcttgatggtgtccccttattcttctttactctttttttaaattctttttccttttgcttctctgactgggtaatttcatttattcttttttcaagctcactaattctttcctctttttgatcaagtctgctattgaagctttctatggagtttttcagttcagttattatattgcttgcttctaaaatttgtttgctctcttaaaattgtttttatttttgtgaaatttcttattttgttcctggattgttttccaatttcaatctgtgttttattgtgattctttcaacttctttaagagaattattctgaattttctgcctgacattttggagatgttgcattcttctgtgtctattgttggagttttgttggtttctttgagtggtgtcatatttccctgagtttccacaatccttgtgtctttatgttgatgcttgtgtgtttgaagagtcagctacctcttccaattattgtgggggtttttttggtggtgttaggcctttattccttagtaatgaaacttcaatgttggcctgttatttcttcccattctgggagtcttatagtgtgcactggtacaaaaacactttgctggaactaacttgttgccctgccattgtttcccactctggggatgttttatagtgagcactggaagttaaaagctgtcctgaaattatattgctgccctacagttttttcccagtctggtaaagacaggtgagtaccagaactcagtcccaacttttagttgtttctgggccaggggaaagctccacctgggatttataaaaaattcagccacagatttgggcctttgcttgaatggtgcccccccttgcagcactatggcatcatccagtctcttcaacatggcacccccactgattgaagcacagagttgctgcctagatctgcatgccagtctttgagattaatgtcctgtgccttgtcttccaatcagccctctgggatacccaatggttcccatatgatgggactggagtgggcttcccatgaagattcccagactgatggggagattgaacatttctcctgctctcttgagttgtcaaccatgtgtttgcatttaggcagcagatggaattattgcaaatcatttactttataaccatttgtccccttatactatcttacaatctacttttcatataattgtgatgagttttctgctgttatggaaaattccatttatggctaaagcttttagtaaatgctatgaagcttgatgactctctctactgaatgggaataattatgcattagttcataaaatgttcttatgagtttgtttagtcactagaaaggctagaatactgatgcttaaatataaaaaatatatagtttaaagagctataatatctagcagttcttttgtttctaaagctccctggacattgagtaacaaataagttaataaagcaatagtttgttatttgattttatatcagaaagcctaaatagtattttaaaaataaagcttccatatattcaatcttattggaaaaagtatttgaaaagctcaacctcagcttcccctgttgttttatctagaatatttaagactttcttaacataaatcatcaaaaatatgtattttttctagttgagatttaactagattaattcagtgtgtggtatttttggctatcataataaaggtattgcatttccaaactgcagaatatttgcactgagtaaaatagatgccatttttttactaagtaattaaaacattgtcagaggatatgcttttaaaaattatcacaatagctgtaaagtcaattgtgttaatattggcaatctgtcccttctatttagaattttgtgccttagtctctgataattgcatcatttacaaatcccctctttacataaacatggcctttcacctaaccctctaaattaatcagccctcttttgattacaagtgacagaaactcaaatcaaaatagcataagcaatttaaataataacaacaataaatgatgaaagtttattagttatcttagctggaaggatttttaaagatgtagaaataaaatgagtaactgtagagtcagtgcctcagagactcacctcgtcatgagtaggactttttccctccatcactttcttacctcttcttagctacatctacatgaaggcattctccacttggaaaaaaagacggaggcacaacctcccatagaaaagagtttctttctcccattatcaatatatctgcttggattctgcttggctatttgcttggattaaatgtttactttttagatacattactgctaatagagaatgagaaaataagactggctatgcctggaggttaggaagtgaggaacaagagaggggcttcgcaagaatcatgtggaatgattgtgtgatgctttctgaaaggacatgagtctaggcagtcaaaaatacctggctaaacaccctaaggctatattccctctatatattccctattccctatattccctcccttacccaaactacccagcatctgctattcccgaactcttttcccctctcatttttttgcatttctattggaagattaacctgtgaataatcttttcaggttcctacctttaaaaatacaggacaaagacaactgcttcattatactcttatctcagtggagtaaagaaagtatctagagttctgtctctttttcaaagtagattattactcttaggaaaaataaaatgggcaaatcagagtttatattcaaaatatctcgtaacacctaaataaggcatggacgctgaacaatcagaattggtctttgtgtagacattgcatcctggaggcccgtattatatcaatcaggcttaaatttcctcattgctggatcattacatggtcctacttatctggctgatggggcaggttaacagttgagggctaggggagttcaaagtagtaattatttatccaccaggacagaaactatgtaatattttggtaataatacatgactgctgactaaccaaggcgggtcactatgtaggggtgcaggattaacagttacttaatagaattagccctgcagtgacaaactttaagagagttacgtgtttggaacattgatttaaaatgttcttttaagtagttgctttgtagcttgcttgttttgttttctttttcccaaatgtacttcaaatgggtcactgaatatcttcaaattgtatgtaaattttggaggggaagtggtatatgcagatttttttttttctggaaagaagaccaatcacttttgccaaattctcaaacaggcccatatttctctcacacacatgcgtgcgcatgcgcacacgcgcgcgcgcacgcacacacacacgttaagatgcgaagaatcactgtcataaaatgtcatatttctaatttctgtaaatggggagaattcctcaagcttatataaaagtgatgtaaataattcagttacaattataaaagaaatggtatcacagcaaatccctttggcaccccactgaaaatttctctctgatgtttaaaacaccatttctatgcttactcttacagctgtattaataatcagataaggggtttatttcttgtctattttgcttagcatattaccaaatctggttcatatgaactcatgggtaaaatctaaaaatgttcatgaattattcttcatgaatttttcacaaagcaataatgtatgaaaaagtgaacaatataacatcagccagagacgcctcagttcgcaatttacaatgaagaaaactggcatatactttagagggaatttctaataagccaaaaggttaaaagctaaatggggtcaagagctgtcaccttgacaaatggtaaagtctaacctttggctcccaccaggccagaccataaccgtagagttactaaagaaagcaactgtcaaggaacaagcccattattaagactgttacttaaagttctaagggaacttccttaaaccgttctatgtgtactttatttatcttgaaactttttgggaacagctgtataacaggaagtagtatttctgaggcccaggaagtgagtaagggctacacaaattggggctaatgactctattttgaaaaacaaacaaacaaacaaaaaaactaaaaaacttctcaggtgttttatgatgaaagtctacttctctatcttccatactgtttgccatcttccttgatgattacatctgatgaccaagctcaggctttcccatacaaatttattttgccaagtttgctttgaaagaatattagattttgtagagttttacattattaaaatcgtgagtggcttcttttgcttttcactgttgagtgtttttgctacagcctaacctatctttttcttattgcttgttttctttgtatttgctactcaatatagcttgtcaaatgtgtaattcatgtcatatacagtgctgtctaatataattcatgggtataaagtgagagagaaatgtaattctaaagttacttgaggtggaccactaaaaggtcctgagttcatttatttattcagcaaatatatattgtccaattgcaagctaggcatcaagtatattcaaggtggtaaataaaatgagcctgatcacttcttttagggcatttacagtgaagtggaggggacggacatgactcaatcaggtgaacacatcagccatataattacaaatgaacatgagagctgcaaaataaatagacgagagagctttgaaaaagagtaataaagggggctacctcagatggagggaggagaggttttatagcaaacttctctgagaagaaaatattttagctatgacctgagaaatcagaaggtgtcagtcaaggtgggagaaagaaaatttaagtagagcgagcagcatgcccaaaggtcacatgaggaactgaggaactgatgggaggccagcatggcaagaatgagtaggagagagaatggcacaaaatgaagaacaagagggcagtgtggcagcactactgctgatacccagatatgtgacattccacctcattccagacacaaagtagaattgcacttcctggctcccttgtgtttgggtggggccctgctactagatctagccagtgagttgtgagcacaaatgatgcctgtaactttctggtcaatttctgaaactaaagtatgtaatggatcagatcacctctgcactagagtagtcattcagtaagacaaggaggaaaaatggtgctgggccctatgtgaggagactatagtgtcctagtcagtttgggttgctgtaataaattactatagattaggtggcttaagcaacaaacatttatctcagttttggaggctgggaaatccaagattaaggtgctggcagattcaatgtctagtgagggcactcctcttggtttgcaggtgggtgtcttcttgttatatccttacatcgtggataacagagagaggaagcaggatttcttatttcttcttataagggtattaatcccatttattaggactctgccttcattacctaattacctcccaaaggccctacctcctaatgtcatcacactagaggttagaatttcaacatataaattttggggggcagaaaaacattcattccctaacatagagggtgaggaagatgagaggaaatgtccctttcagagactgaattgggaagtaaaccactttgtgtaatattgcagtaggtactgctatagtgaggaatggagagtggatggggagaactctcctttggtaagaagaaggaagaaaaagatgtaaagtagtgcctatgatcctgatgaatttactttactcaaactttcattaacctctacaaacaaaaaagaacctgagaagacttttgttagtcactttcctgtgcattgaggaattgtccagagggactagggaagcccatcagactaatggcagacctcttagcagaaactccacaagccagaagagattgaggaccaatactcaacattcttaaaagaattttcaagcagagaaaactcaggattaagaaactcactcaaaatccacacaatttcatggaaattgaacaacctgctcctgaatgactcctggttcaataatgaaattaaggcagaaatccagaagttctttgaaaccaatgagaacaaagagacaacataccagaatctctgggacacagttaaagcagtattaagagggaaatttatagcactaaatgcccacataagaaagctggaaatatctcaaatcgacaccctaatatcacaattaaaaagagctagagaggcaagagcaaactaatccaaaagctagccgaaaacaagaaataactaagatcagagaagaattgaaggagatagagacatgaaaaactctccaaaaaaatcaacaaatccaggagctgttttttttttttgaaaaaactaacaaaatagatagaccactagctagattaataaagaagaagagagagaagaatcaaatagatgcaataaaaaatgataaaagggatatatatcatcactaatcccacagaaatacaaactaccatcagagaatactataaacacttctatgcaaatacactagaaaatctagaagaaatggataaactcctgaacacatacaccctaccaagacaaaaccaggaagaagtcaaattcctgaataggccaatagcagtctctaaaatggaggcagtaattaatggcctaccaaccaaaaaaatcctaggaccagactgattcccagctgaattctaccagaaatacaaagaggaactggtaccattccttctgaagctattccaaacaattgaaaaggagggactcctccctaactcattttatgaagccagcatcatcctgataccaaaactggtaagagacacaacaaaaaaggaaaacttcaggccaatatccctgatgaacatccatgcgaaaatcctcataaaatactggcaaaccaaatccagcagtgtatcawaaaacttattcatcatgatcaagccagcttcatccctgagttgcaaggctggttcaacatatgaaaatcaatacatgtaatccatgacataaacacaaccaaagacaagaaccacatgattatctcaatagatgcagaaaaggctttaataaaattcaacatcccttcatgttaaaaactcacaataaactaggtattgatggaacatttctcaaaataatgagagttaattatgataaacccacagccaatgtcatattgaatgggcaaaacctggaagcattccatttgaaaactggtacaagacaaggatgccctctctcaccactcctattctacattgtattggaagttctgaccagggcaatcaggcaagagaaagaaagaaagggtgatcaaataggaagagagaaagtcaaattgtctctgtttgtagacaacatgattttatatttagcaaacaccatcatctcagccccaaaatttcttaactgataagcagtttcagcaaagtctcaagatacagaatcaatgtacaaaaatcacaagcattcttttacagcaataataggaaagcaaagcagaaagccaaatcatgaatgaactcccattcataatcactacaargagagtaaaatacctaggaatagagctaacaagggatgtgaaggacctcttcaaggagaactataagccactgctcaaggaaataagagaggacacaaacaaatggaaaaacatttcatcctcatggataggaagaattgatgtcatgaaaatgaccatactgcccaaagtaatttataaattcagagctatgcccatcaaactatcattgacattcttcacagaattagaaaagactattttaagtttcatatggattcaaataagactttggatggccaaaacaatcccaagcaaaaaaagcaaagctggaggcagcaggctacctgacttcaaactatactgcaaggctacagtaaccaaaacagcatggtgctggtactgaaacagacaaatagaccaatggagcagaacagagatctcagaaataacactacacatctacaaccatttgatctttgacaaacctgacaaaaacaagcagtggagaaaagatctcttattcagtaaatggtggtgggagaactggctagccaaatgcagaaaacagaaactggaccccttctttataccttatacaaaatttaactcaagatggattaaagacttaaatgtaaaacccaaaacaataaaaacagtagaagaaaacctaggcaatactattcaggacataggcctgggcaaagacttcatgacaaaaacaccaaaggcaattgcaacaaaagccaaaattgacaaataggatctaattaaactaaagagcttctgcacagcaaaagaagctgtcatcagagtgaacctacagaatgggagaaaatttttcctatctgcctatctgacaaaggtctaatgcccagaatttacaagtaacttaaacatatttataagaaaaaaacaactccatcaaaaagtaggcaaaggatatgaacagacacttctcaaaagaagatatttacatggccagcaaacatatgaaaaaagctcaatgtcatggatcatcagagaaatgcaaatcaaaaccactatgagataccatctcatgccaatcagaacgacaattattaaaaagtcaggaaatgacagatgctggcaaggttgtggagaaataggaatgcttttacattgttggtggaaatgtaaattagttcaaccattgtggaagacagtatggcaattcctcaaggatctagaaccagaaatactatttgacccagcaatcccattacttagtacatacccaagggaatataaataattctactacaaagatacatgcacttgtatgtttattgcagcactatttacaatagcaaagacatggaaccaaaccaaatgcccatcaatgatagactggttaaagaaaatgtagtacatatacaccatagaatactatgcagccattaaaaggaatgagaccatatcctttgcaggaacatggatgaagctggaagccatcatcctcagaaactaacactggaacagaaaactgaacaccacttattctcacccataagtgggggttgaacattgagaacacatggacacagagagggaacaacacacaccagggcctgttctggggaggggattgagtggagggaacttagaggatggtcaataggtgcagaaaaccaccatagcacacatatacctatgtaacaaacctgtatgttctgagcatatatcccgttttttttacaagaaataaaaataaagaaaaaaaagaaaatctcttgcaaccaatgaaaatgaaaacaaaatataccaaaacatatgggatacaactaaagcattgctaagagggaatttcatagtgataaatacctatattagaaaagaagagaggattttaatttagcagactcacctagagagcacaactctgattttgttgagaaagcctatctccacagaacctaaaacacacaaactttcaaggtaggggagattggaatccaagaagaatgcaaaaacattttgcaagctggtaagtctctggactggagaatatctggatcaggaaggaggcaagatggtcgactagatgcagccagaaggaacatctcccaccaaaggactgggacatcagaaagactggcacactcctagcagatcttcacagggaaggcactgagggcagatagagggaagacacagatgctgggctgcagagggaggaagctgggaaccctgagcaatgctagtgcacaccaggaccggttcctggtccccaagaactcctggggatggggtgaattgaacaggccaggagcgatccactctcgcatggatctctggaatcctggcatggggaaatcctttaaccaccatggacatttgaattggcagagagagctgcttagagaagtggaagggacagaagtccagccagtgcagagcccaaagggtttggagtgggagcacctatagtggagcatggccagggacacccatctccctaagctagacttgtttccataggagactgtagccctaggggaactgtcacctgaactctgcagggaggtcytgcccatgaaatggcagtccaccttgagtacccccttggtctgctggcctctccaggggccccagcctggctgcaggtgcttgcagtgcagtccccaggtagctcgtgggggcctgcattacagctcctgttctagtgggtcaggcctgactggcagagtgctccagcatagcagtccctgcagacaccagcatgcttgtggcctcccacaactgcagcgtcccccatgctacttggccttcacatactcaccaatggccacccccacattgctttgccaccatgtatttgcatgggcagactttgccttccttaccccaccaggatatgtgcatgcatgcatcctaccataccgctgctgcctgcatgagtgcaccttgttgccaacaccccactaaaccaccattgttgttagagcactgggtggcacagagcccaccagccctgcctttgccagcattctgctctggcaccaacacttccagcaatgtgaaactggacacagagaacagcagagtcacccctgccttgagcagccaccactgcctgcatgaaaacacacagagggtccacagtcttgtgtccatcagcacttcaaccccatgctaataccaccaccagcacgaatgcacacacagtcactggtgggggtccccgcccccaagccatgtcgccatgtggccaccactgctgctgtgaatgcccacacagaggccagaaccccagcacctgctagcacactgccacatccaacaagcatgcaccctgctgtgttgccactgtcactgctgctggcacatgcaaatgagaacagattctgctgcctctgccctatgaagctctttgtctggcactacccatcagagtgttgtgaccaacagtccagaagtaactcagcccctccagtgcagcaggttcctaaccttgaggagccagaaaacaaagttgggaactgataccagtcccccagggttagagcacacagtccacgagtcctgagttgagtcttggtcccctaaaatcttccagaaattgagccagtcaactgaacccaccttataccaccatgaaacacccaaggtcatgaaatagaacaaaagaaaaaaatccaaaggacagtaatttcaaagattggaggaacaggccaggcgtggtggctcacacctgtaatcccagcactttgggaggccgaggtgggtggatcacgaggtcaagatatcaagaccaccctggccaacatggtgaaaccccatctctactaaaaatacagaaaactagccgggcatggcagtgggcgcctgtagtcccagctactcgggaggctgaggcaggagaatggcgtgaacacgggagacggagcttgcagtgagccgagactgcaccactgcactccagactgggcaacagagcgagactccatctcaaaaaaaaaaaattcgaaaaagattggaggaacatcagaccacaaagatgagaaaaaaccagtgtaggaactctaagaactcaaaaagcctgagtgtcttctttcctccaaatgatcatactagttctccagtaagagttcttaactgggctgaggtggctgatatgacagaaataaaattcaaaatatatatagaaatgaagatcatcaagattcagaagaatgttgaaaccaatctgaggaagctaggaatcacaataaaatagtacagaagctgacaaacaaaacactcagtatagaaaagagtgtaaccaacctgatagagctgaaaaaacacagtacaaaaatttcataatttaattgtaagtattaacagcagaatagaccaacctgaggaaagaatcttagagcttgaagactggctttctgaaataaaatagtcagacaagaataaagaaaaaataataaaaaggaacaaacaaaacctccaagaaataagatattatgtaaagagaccaaatctatgactcattggcatccctgaaagagatggagagaatggaagaaacttggaaaacatatttcagaatatcatccatgagaacttccccaacctagctagtgaggccagcatttaaattcagaaatgcagagaacccccataagagacttcacaagaagatcatccccaagacagacaatcatcagattctccaaggttgaaatgatagaaaaaatgttaaaggtagctatagagaaaggacaggccacctacaaagggaagtccttctgacacagcagacctctcagcggaaactctaccagccagagagattgggggactatattaaacattcttcaaaaaaagatattccaactgagaatttgatatctgcccaaactaagtgtcataagcaaagaagaaataagatccttttcagacaaacaaatgctgagggaattccttatcatagacctgccttacaagaacccctgaaagaagcactaaatatgaaaaggaaagaccgttatcagacactgcaaatacacagtgtctctataagtacacagaccagtgactctataaagcaaccacacaaacaagtctgcatagtaaccacctaacaacatgatgacaggatcaaacccatacaaattaataccaaccttcaaggtaaatgtcctaaatgctcccaattaaaaggcacagagtggcaagctaaataaagaagaatgacccaatggtatgctgtcttcaagagacccatctcatatgcggtgacacccataggctcaaaataaagagatgcagaaaaatctaccaaaaaatgcaaaacagaaaaaaacaggggttgcaatcctaatttcagacaaaacagactttaaactaacgaagctcaaaaaagatgaagaaggatattatgtaatggtaaaggttttaattcaacaagaaaagctgactatcctaaataggtacatacccaacagaggagcacccagatttataaagcaagtttttagagatcttcaaagagaattggacttccacacagtaatagtgggagacttcaacaccccactgacagtattagatcattgaggcagaaaattcacaaagatattcaggacttgaactcaacactggaccaaatggacctaatagacatctacatatctctccacccaaaaacaacagaatatgtattcttctcatcaccaaatggcacacactctagagttgatcacataatcagactttagacaatcctaagcaaaagaaacaaagtcatattgaaccacagtgcaataaaattagaaatcaagactaagaaaattgctcagaaccatacagttacatggaaactaaacaacccacttttgaatgccttttaggtaaataatgaaattaaagcagaaatcaagaagttcccagaaactaatgagaacaaagataaaatataccagaatctctgggacacagctaaggcaatgttaaccaggaaatttatagcactaaatgctcacatcaaaaagttagaaagatttaaaataaacaacctaacatcacaactaaatgaactagagaagcaagagtaaaccaaccccaaaactatcagaagacagtaaataaccagaatcagagctgaattgaaggaaattgagacatgaaaagccattcaaaagatcaatgtatccaggggctgtgtttttgaaaaattaataagacagatggactgctagctagactaataaagaagaagagagaagatccaaataaacacaattttaaaaataagatagtaattaccactgaccccagaaaaatacaaataaccatcagagactactatgatggtttgtgtactatgcacacaaactagaaaatctagaaaaattgataaatccctggacatatacactctctcagactgaaccaggaagaaattgaatccctaagcagaccaataacgaactgtgaaattggatcagtaaatttatcagtaaatagcctaccaaacaaaagaagtccaggaccattcatatcacagccaaattctagtagatatacaaagaagagctggaatcattcttattgaaactattccaaaaaattaaggaggagggactcctccccagcacattctatgaggccagcatcatcctgatttaaaaaaaaaaaaaacacctggcaaacacatagaaaataaaacttcaggctagcattcttgatgaacatgcatacaataatcttcaacaaaatattagcaaaatgaatccaggagcacatcgaaaaactaatccaccacaataaattggctttacccatgggaggcaaggttggttcaacatacacaaatcaataaatgtgattcatcacataaacaggaccaatgcaaaacccacatgattattgtaatagatgcacaaaggcttttgataaaattcatcacctcttcatgttaaaaaccctcaaccacctaggtactgaaggaacgtacctcagaaaaataagagttatctatgacaaatccacagccaacatcatactgaatgggcaaaagcttgaagcattccacttgaaaaccagcacaagacaaagacgccctttctcaccactcctattcaacatagtattttaagtcctggccagagctatcaggcaagagaaagaaataaacagcaaggcaataccaaacagccaaggcaatactaagcaaggagaacaaaaaagaacaaatctggaggcatcacactacctgatttcaaactattctacagggatacggtatccaaaacagcatgattctggtataaaaacagaaacatgaccagtgaaacagaatagagagccctgaaataaggctgcacacctacaaccatctgatcttagacaaagcaaaggggaaaggactccctattcaataaatgatgctgagaaaactggctagcgatatgcaggagattgaaactggacccattcagtacactatacataaaaattaactcaagatgggttagagacttaaacgtaaaactcaaagctataaaagctctggaagacaacctaagcaataccattccagacataggaactggcaaagattttatgatgtagatacctaaagcaattgcaacaaaagcaaaaaaatgataaatgggatctaattaaatacagagcttcctcacagcaaaagaaactaccaacagagaaaatagacaacctacagaatgggagaaaatatttgcaaactatgcatctgacaaagttcttatatccagcatctataaggaacttaaatttataagaattaaacaaccccattaaaaagtgggcaaaggacgtgaacagacactttgcaaaaaaagtacgtgcagctaacaagcatatgaaaaaaactcagtatcactgatcattagagcaatgcaagtcaaaaccacgagatgccatctcacatcagtcagaatggctattattaaaaagtcagaaaataacagatactggtgagcttgtggagaaaaggaaatatttatacactgttggtgggaatgtaaattagttaaactattgtagaaagtagtgtggcaattcctcaaagagctaaaaacagaactacctgtcaacccagcagtcccattactggatgtatacgcaagggaatagaaactgtttcatcataaagacacatgctcacatatgttcactgcagtactattcacaacagcaaagacatggaatcaatctaaatgcctatcaatggtaaactgagtaaataaattgtggcacatatactccatggcatactatgcagccataaaaaggaatgagatcgtgtcctttgcgggaacatggatagagctggaggctgttatctttagcaaactaatgcaggaacagaaaatgaaatactgcattttctaacttataagtgggagctaaatgatgagaagacatggacacaaagatggaaactaggcttagcaactgggtgacaaaataatctgtacaacaaactcccatgacacaagcttacttatataacaaacttgcacatgtatctctgaacctaaaataaatgtctttttaatatctggatccaaattgttttactggccaatggaaaaagattttttgcccagatggctaaatcttttgaataatatttgtgaaaaagacttttaagatttttgaataatatttgtgaaaaagacttttaataatattagtgaaaaagacttccttacagaaggcaaattaagtcttaatttaatttggcagcttttaatgtggcaatctttgattctttattcttttagatggctgtgtgcaccaattaaagaatgcatcccatttgctaaagaaattaaaatttaaaagaaaaaaatcttaaacaatttaatactacatctcaaggaagtagaacaataacaacagactaaggccaaattaggcagaaagagggaattaacaaagatttgagcagaaatacatgaaacggaaaattcaaaaataatagaaaaaaataagacaactaggaattggttttactggttttttataaatataaactaaattggtaaaaccttaagtaaactaactagcaaaaaaagagcgatgcctcaaataaaaaaatcagaaatgaaagaagagaaatcacaaatgatgccacaaaataagaaagaatcaaaagagataactatgaacaattatgtgccaacaaactggataagctagaagaaatgaataaattcctagaaacatacaatcaaccgagactggattctgaggaagcagaaagtccgaacagacctataactagtatagatattgaaatagttattacaaagctcccaggaaggaaaagcccagtaccaggtggcttcactggtgaaattctaacaaacgtttaaagaaaaatttataccatttcttctaaaacttttcaaaaaaattgaaggggagagggaacatgtccaaattcattactctgatactaaagtcagacaaaagcaccacaagaaaacaaaactataggccaatatccctgaagaatgaacatacaaattcctcaactaaaccccagcaaactgaatccaagagcacattaaggggattatacaccatgaccaaatgggatttgtacttgggatgttagaatggttcagtgtgtaaaaattaacgtgaaattccacattaacaaaataaagcataaaaacatgtgatcatctcaagatacagaaaaagggtttgacaaaatttaacatcttttaattaaaaactcaaactagtaatagattatgtcaaatacaaatacaaatattatatacctcaacataataaaagccatatattaaatgcccatcactaacgtcatactcaatggtgaaaaaccgaatgaaggcttttcctctaagattagaaacaagacaaggatgcccactttcactgcttctattcagcaggatacttgaagccctatctagagcaattgggtaagaaaaaaagtaaaaaggcatttaaattgggaaggaagaaataaaattttccctgtttgcaggtaacatgatcctatatatagagaaaactctgaagattcaattaagaaactgttagaactaacaaatgaatttagtgaaattacagagtacaaaatcaacataccagaatcagttgcatttctatacactaacaacaaactatctgaaaggaaattaagaaaacaatgcccatctaaactagtgccaaaaagaataaaataatttagtaatacacctaaacctaactaacaaggtgaaagatttgtgtattaaaaactacaaaacattgatgaaagatactaagcaaatcaaaagacattgaatgttcatgaactagaagacttaacattgttaaaatatccatactaccaaaagaaatctacagattcaatgcaatccctatccaaatctcaatgtcattttttacagaaagtgaaaaaaagctctaaaatttatatggagccatgagtcaagaaataaccaaatcaatcttgaaaaaaagaataaagctagagacatcacatttcctgatctctagatatgttacaaaaccacagagatcaaaacaatatgatactggcattaaaacagacatatagaccaatggaacataagagaatccagaaataaatctatgcatacttggttgttttattctattcgggctactataataaaataccataaactgggtagcttataacaacagaaatatatttctcacagttccagaagtttggaattccaaaattgaggcacaggtactgatggactgcttcctcatagttagtgccttctcactgtgtctcacatggtggaaaggtgaagcattcctctcagatgtcttttattcatgaagtctccacttttatgacctaatcatctctgtaagtccccgtctcctaatgccattcaacatatagatttagggagacaaagattcaacatatggattttgggtgacaccaacattcagtctatagcaacagtcaactgacgtttgataaaggtgtcaagaatacacatagagattggagagtctcttcaacaaatggtacttggaaaactggatatccatattaaggaatgaaactggatgcttgtcttacatcatatgcaaaaatcaacttgaagtggcttaaagattaaacatagaccaagactataaaactactagaagaaaaccttcatgacattggtcttggcaatggtttcatggatatgacatcaaaagcacaggcaacaaaaacaaaagtaaacaaataagaatacatcaaactaaaaagcttgtgggtgaattgtttgagctcaggagttcgaggccagcctgggcaacatagtgaaaccttgtctctacaaaaaattaaagaaaaaattagctggatatggtaggctcacacctgtagtaccagccacttgggaggctgaggtaggaggattgcttgcacctgggaggtgccagaggttgcagtgagctgaaattgggccactgtactccagcctgagtgacagatccagaccctattgcaaataatagtaataataataattaataaaataatgatatgaatcaacagagtgaaaaggacacttacagaatggggggaatatttgcaaaccgtatatctgataaagggttagtatccaaaatatctaaaataaaccccttcaggttattagttaaaataaaagagagagaaaaataaataaataaataaataacctgatttaaacatgggctatggacttggatagacatttcttcaaagaagacatacaaatggccaacagatattttaagaaatactcagtgtcactaatcatccaggaaatgtgaattaaaactataatgaaatatcacttaacacctactatagtagaatggctactgttaaaaaaaacagaaaatagcaagtgttgacgaggatgtacagaaattggaacccttgcacactgttggtggaaatgcaatatggtgcagcttttgtgggaaacaaatgaagttcctctaaacatttaaaaatgcaattacatgatccagcaatcccactttggggtgtttattcaaaagaattgaaatcaggatctcaaagatgtattagcactcctatattcattgtaggattattcacaatagttaagatttagaaacaacttaagtgtctattgacagatgaatagatgagaaaatatggtatataaatagtggactattattcagccttaaaaaagcaggaactattgccgtatgtgacaacaacatggatgaaacttaaagacattgtgctaagtgaaatacatgagtcatagaaagacacatattgcatgattccacttatatgagttatctaaaatagtcaaattcatagaatcaaagagttggattgtggttaccagtgggtggaggtagagagaaggtagagagaaatggggagttactaaacaatgggcgtaaagtttcagtcaagaaagatgaataagttctagggatctgttatacaacattgtacctatagtcaacaataatgtattgtacacatatgcatttgttaagaaagtagttttgtgtttaatgtttttagcacaattttttaaaataaaaagacagtggtattctaattttcctttcttttcttaaactcaattagaatttctaaatttggggcatgttcttacatttataggtaacagttcatttattattttgagacatagagcaatttataaggaaattaaagggaaactccctttaattcatcttccttcctgatattcaagaacatagactgagctttcctctatctctttcagttctagtttatatttgcaaaggtgtgtctgggccagtccaatctttcttcctactgttctcatctaccatatcaatttacattacagatcacatgccgaactttaggggagaggacaaattactgggattaacaatgaaagatatagaactgctcaggatattttctaggtttaggagacttgaggaaaatgaataagtgaaatgtagacatatatgaatgaatatatcaaacatcagaggagaaaatttagctgtgtccagagaggacagagatgctatctttctattgcttgtttttgaactttctttcgtattttattattgtattgttaataatcattgaagtagtgtgagaaatttcagagaagtagaagtagagcagtttctctgaaaaacttatagatggtgacagatgaccacataattgtgtgacagtaaaatgctgtattgagcttcctgctgtattatagaaagaacatatgaatagataaaagcacaacagttttccttttcactatgtctcaggagaaaacaatgcacatcggcatatatggaaacaaatgagattagttaaaagaaggaatttaaattatgtagactaagccagggtaatgcttacgaatgagatgactcatctaataaaagcatcaaagagaaaaactgttgtttcagttcagattttcttggtcgttttcctgagatgatgatgatgatgatgatgatgatgatgatgatgatgataatttgctttaggaaggagctgcacactacaaaatgcaacagagttgataatgataagattagttgaattaagtaattctagaccccaaattgattatttcatttcactttctaggtcaatagtgtaccttgttgcaatgaactgagttggttgtaaaaagtctactatcttatcaaaagattgttcaaaaacatctccatgtactaaatactatcaagcaaaaatatattgtgtatagggaaatacagtatttaaaaaaattggtagaatctacaatgaactcaaacaaatttacaagaaaaaaacaaacaaccccatcaaaaagtgggcgaaggatatgaacagacacttctcaaaagaagacatttatgcagccaaaaaacacatgaaaaaatgctcatcatcactggccgtcagagaaatgcaaatcaaaaccacaatgagataccatctcacaccagttagaatggcgatcattaaaaagtcaggaaacaacaggtgctggagaggatgtggagaaataggaacacttttacactgttggtgggactataaactagttcaaccattgtggaagtcagtgtggtgattcctcagggatctagaactagaaataccatttgaccctgccatcccattactgggtatatacccaaaggattataaatcatgctgctataaagacacacgcacacgtatgtttatagctgcactattcacaatagcaaagacttggaaccaatgtaaatgtccaacaacgatagactggattaagaaaatgtggcacatatacaccatggaatactacgcagccataaaacatgatgagttcatgtcctttgtagggacatggatgaaacgaaaccatcattctgagcaagctatcgcaaggacaaaaaaccaaacacgcatattctcactcataggtgggaattgaacaatgagaacacatggacacaggaaggggaacatcacactctgggtactgttgtggggtcgggggagcggggagggatagcattaggagatatacctaatgctaaatgatgagttaatgggtacagcataccagcatggcacatgtatacatatgtaactaacctgcacattgtacacatgtaccctaaaacttagagtataataataataatgataataaattggtaactagtttaaggtcatgtaacctactcacacaaataatcacaataagatgtaatatagaatgtgcatgtaaaacataaattttatacataaaataaataatagatcatagccctgatgcatgcgtgcacaaacacacacacacacacacacacacgacacacacacttgcactatatttgcaatagcctagctactaaggaatctgattaaacatagattctatcttgcatatccgatttcttaatagcagaattaagagcttcttggaagaaaaggcttatactcaaaatctgcttttctgaatccttttgagttgagcacaaaaggaaaccaaaaagacccaagaatagcaatgcaatgtgtgtattgaaggtttgttaggaattattcactattgtatttcttttctgtcctacattacagcataggctttgcctagaggcaaaagaattaagaattacttgcagttcctactcttttgcagtcaaggcagtaatagggtgatggataaggtgtatagaacagcagttctcaccaaatgcccttgaaaaatcaagcaaatagatggcttcacatttcattatctaaccccgatatggcctgacatttatactgggagcagagatgccaatataactgaagggttttgaaatggccctttgaggaaaggtgatgaggtatccattgatttaatctaagaggagatggagaaataatacaagagggacttgatttcacatgcaacttgtttaggagaccgcatctcaacagtttttgaatggcatatttctagctgttcatgtggctttatgctgatagtgtcagtcaaatgaacaagcttgaagtttttaatcagaaaatattacattttataagtggaagggtgcaaaataagaagattgcaaagtagcgctgcctgcacctatcattaatgctgtgtggatttttttctaattgaaaacagcacaacgagagctctgagtatgagatgtagttatacaaaaaggcataagatgctagacaccttcaaatactgggtgttctccttactagccatatgaccttaagcaatgtatttaacctattctttgttctcattttcctcattcataaaatatgcacaataaaacttaccttatagttttgtttcaaatataaaatgaataaatattgttaaattatttcgagcattctttggtacacagtaaaccctccgtaagtattaacttttatggataaaaacttttaaaaaatggaaatagatttattatttttatctgattatgaaaattatatgtgattattatttaaaagattttaaagaaagatgcaaagagaaaaaattacttaaaatcaatttgtcctcagataactatagtgaacatttaggtatcatagttccaggaagacttttgtgttcaaaagatgcataatgtatacaattgtgtcatgggcacatctcctcgggccaatctatggctgacccctactccatcctacccctaaagtaaacatgcattttgacctgtatcactgtcatctgtcaaaatccatgctcctcaaaggcagtatcttctgtaaaccctcaatctttttattactatctagattctcaggcttaattgttccaaattatgccagccatcacctccatgcaaatctcacttacctacctctttatccatcaaaaataatctattaaaatcagttatacttacttatttagcacttaaatattttagactttgtgctaagtgcctcacatatagcatttttactcttccagatagctttcaagggagctttcataacaaccattttagcattgtttcgatctcattctcaatctccatctctttcaaactataaactaaatttctcccttggcaaggttggcctacacccaggaacaagcaaggaaagccaccctctgaggctagaagcaagatggagtcagccatgctagccttctctcattgttataatctttgcaaagctggtttcatattttactaatctttctctgttaaatggacaaacatccttcttgatgctacttcacacaccttttccaacctctctgtacttgacacaattagacaaagcatttgctcaataaatatttataaagttaagaaagaatcactttatacctaagagtggatcctaatgtttacataaatatattcctgtattgaggttcttcctttctccccaattaccaaattctttctttctttttctttctctttttctttctttctttccttctttctttctttctttctttctttctttctttctttctttctttctttcttctttctttctttctttctttcttctttaagttttgggatacatatacagaacatgcaggtttcttacacagtatatgtgtgtcacgatgatttgctgcacctatcaacccatcacctgggttttaagccctgcatgcattagctatttgtcttgatgctctccctcccctcgtgcccccatgacccaacaggccctggtgtgtgttgttcccctccctgtgtccatgtgttcccattgttcaactcccacttatgagtaagatggatttctgtttgcttttctgatcctgtgttagtttgctgtgaatgatggcttccagcttcatccatgtccctgcaaaggacatgaactcattcctatttgtggctgtatagtattctatggtgtatatgtaccacattttctttatccagtctatcattgatgggcatttgggttggttctatgtctttgctattgtaaataatgctgcaataaacatacatatgcacgtgtctttataatagaattatttatattcctctaggtatttacccagtaatgggattgctgggtcaaatggtatttctggttctagatccttgaggagttgccacactgtcttccacaatggttgaactaatttacattcccaccaacaatgaaaaagtgttcctctttctccacagcctctctagcatctgttgtttcatgacttctttttaataagcgccattctgactggtgtgagatggtatctcattgtggttttgatttgcatttctttaatgatcagtgatgttgtgcttttttttcatatgtttgttgcccacatgaatgtcttcttttgagaagtgtctgttcatgtttttgcccactttttaatgggttttcttgtgtttttcttgtaaatatggttaagttccttgtaaattatggatggtagccctttgtcagatgggtagattgcaaaaatgttctcccattctgtagattgcctgttcactctgatgacagtttcttttgctgtgcagaagctctttaattagatcccatttgtcaattttagcttttgttgtgattgcttttggtgattccatcataaaatctttgcccatgcctatgtcgtgaatgggattgcctaggttttcttccagggtttttatggttttgggttttacatttaagtctttaatccatcttgagttgatttttgtataaggtgtaaggaaggggtccactttcagtcttctgcatatagctagccagttttcccagcatcatttattaaacagggaatcctttccccattgcttgtttttgtcaagtttgttgaagatcagatggtcttatatctgaggtctctattctgttccactggtatatgtgtctgttttgatacctgtaccatgttttggttactgtagccttgcagtatagtttgaagtcaggtagtgtgatgcctccagctttattctttttgcttagaattgttttggctatacgggctcttttatggctccatatgaattttagagtagtttttttctaattctgtgaagaaagtcaatggtagtttgatgagaatagcacttaatctataaactactttgggctgtatggccattttcatgatattgattcttcctatccatgagcatgggatgtttttccatttgtttgtgtcctctcttatttccttgagcagtggtttgtagttctccttgaagaggtccttcatgtcccttgttagctgtattcctaggtgttttattctctttgtaacaattgtgaatgggagttcattcatgatttggctctctgcttgtctattgttggtgtaaagaaatgcttgtgattttcacacactgattttgtatcctgagactttgctgaagttgcttatcagcttaaggagatttggggctgagacaatggggttttctaaatataggatcaagttgtctgcaaacagagacaatttgactttctcttttcctatttgaatacgctttatttctttctcttgcctgattgccctggccagaacatccaatactatgttgaataggagtggtgagagagggcatccttgtcttgggccagttttcaaagggaatgcttctcgcttttggccattcagtatgatattggctgtgggtttgtcagaagtagctcttattactttgggaaatgttccatcaatatctagtttattgagagttttatcatgaaaggatgttgaattttgtcgaaggccttttctgcatctatcgagataccaattaccaaattctaagattacatggtgttctgcagtgaatagatctatgcaaacctacccccaaagttcaaggaagctgagaggctgaagaggctgacatatccagcttctcaggaaaaatgaaaaaacaaaaaacatttaatagccaggtcccaggtggctgcaagaggagatggtggttcactgcagtgttagccccagacctaggaattatttgctgtagtgaaggaacatgtaggacagttgaaatcaactcctcagggaaaggcaagcatgctatgtaaatctgcctaagggaaggatttatggttgaggctgttttgaacaaagggtagaatttatggtaacagtaggtaaagtataaatcttagaggcattcctggaactggggtaaatcagatgtcagtatggtggactgacaatgaagatggagttgctttagtctccacacatgggaacagatagaaaaaggtgtctttataaccaaaatgttggcttttacaaagctctgctgtaattctaaatagatggaagaggataaatcaaataactgaattaacttaaaaattccctttttagagtaacttcttcaaatttaaaagaattttatcaaagtagtgtgggcatatctactgggggatggagaaacatagagcaagagagagagaactttgtgatggaaatcaagattttcttaaatctctcatagaataattattagagtatttatgaattttcttctcttctccaaattatcttcacttggggttattttatctttatttgtgtatcttggactgtcttttttcaaagcaagctttctttagatgcctgatgagctatgattataattttattcaagtttaaggaatgaaaagctgattgggctctgacttgcactttgctttggagtcatggggctatgaattaacagttttcctgggggggatcagaacatgccagatgatggaagtcttttgtctggagctattattttgatttagaaaggttttattttagtgaagttataaagaatcctcaaatatttctctaagctggagaggcctgtctcctgggtgtcctctttcctgcagggttggatagtggctatttctacccatagatacttgtaattgtcagttccccatgtcactcctgtaccctttcctgtcttcattgcatgtggtgttttggaattcttagcctttctggaaaggcaatttctctctctcagtctgtcatatttatatcccttctagataatctaacctgtggttgactgtatttcatgtgctatctcttctttatctgctttgtcatctatacatctgttgacatattttgtattctcatgactctctttcagttccttactaccattagggttttgtacttttctcccctttagtgacatctaagatgggaaagattgtaaatacatatgaccagattcatcagggaaatatatgctattctaggtagttcacacaagatattatgtaatacaggtaattaaaaggttacatggtcattctgagaacttggagttaggtgattagagaagttgctactagaatgcaagaaactgggaagtggaaagatcacagacagctgccaacagtgttctctggtgccaacagcttaaaacttagttctcaggaaaatctccagtgtgttttgggttttgccaattacattatatcatgtatccaccattactgtatcatacagaatggagaaataacatgtttattgaatacagacacacacacacacacacacacacacacacacacacatatgacaatgccaaaaaagatagatagaacttctaatttcattgatgtttctagtttcctgaagaagctagaaagaatggtatggatatcatttttctgaatatatacataaaggttgaaattaatataactattcagaattttaaaacaatgaataactgtgatatgggatttattttatttttaaaaaaatgaggaagattttcatgttatgatgctttcatacggtatctctcgtatgagtgacaatactgccttttaattttttctcaaaatgttatagggcaacaagagattggcagtatgagctgtctttttattgtattttaatggtaaacttgtacatgattatggggatattctaacttttatgattttttaaacaactctcagttccatcccataaaagagctttatgtagaaatacttttagcagcttttaagtttatttcatcttctcttccccaggagacaaggtaaaagtagagattacattttctggagatattactttcatttatatctttataaatatggatagacaattttataataacagtgctaacactgaaaaggaaaagagtaagattttgtaatttataaataatccttatggggatgttattatttaactctgaagatgttgtttcacttttcattattttggtttcagtcactgcttgcagaatagtaatctcttagcatatgaagtcagcagatcaaatgcaagaaacaaaacaaaacaaaaaactcagaacaaaatcaagaaggctcaaagtttagcacactatttatttcactgtttttaatcatactcaggaagggttttagtgaagaaacaggagtgagattaatcaaaatagctcaaaatgctcaaaacttaagttatatattcaggaggctttaaattcccaccattttaaaaagtgttctttaaacctcaatttcgggtaccttgctgttccttgggtttgactgaggatcagtattttcttgccatttatcacacttaaacatagagcatccagaatcaataaactacaaagcagaagatttagagaatctatctttccagaataatagtcatactttcccaaacatgttctatacaattttaggggactatagacctttggtatatatatcagatgttaagctttttgttccattaacattactgtagtcagttgtaatgctatgttgttaatctagagacaggaatatataacttctattttcttcaaatgaaaaatggctttggtcataagtacctatacccaaatcttatttcaatatactctacattaacagcatgttacagataggaatccagtattatatttacataaattagttatttatctcgatatttacagagtgctaggcattgtgcaagtcaaataatacatattcactgtcctcaaaaactcaacactagctaatgggagaccagcatcaaaataaaaaaataagagcaatacagttttctatgtgcaagacagacacagttctacagggctggggacagaaggcactgaagaggaatggagaaactgaatgaggaaaaactttggagaggaggtgtggctggagctgagtattgaaataggagaaatatttgttcagatattactctttttattttttcatgactgaattccaggcatacgtaccttcaaataccttattgcagatgacctagaaggctgcatgtaaagataaatacatcctaacatttgtatattgttgcttctcaaatttcacaactgtgattacttgctgtgttggttactgatctttattttcatttacttagcatcttcattgataatcctgattgatgtagttttactttcatcatctaaatatctctagtttctaatttattctgtgtagagactttagtttcatcaaatataagtgggcatgaaattatatacctgagccaatagaagaactcaagacttttatttgccttaatgtaggatttaaaaaccaattcaaaaacaattgtttatatatgtgggaaaattcctttaagtttctgttgataggtattggaataggtttcctagtaagatattaaatgtgtcatccaaataaatttttaggttacataaacactgatcttgaataaaatagctatagttctacctggaggtagagagtcataataatatcaaattagagctcatgtttgtgtgtgtatgtgtttgcatacttgtgcacgtgctggcttttatgtacaaaatggtgatcatcaaaggtagttgtcatcaaaaagtcatagattataaaagctaaaaaggacactgtattttaaagatacggaaacctaggcccagaaaaattagacaggttgcttaagactgagagcagagcccagaacttgggcctcttgacttccctttgcaaatatatcattgtgctttgaaattatagatatacggaatcatagaacaggaagaaactgtatgatcatccagagctcattgacagcccctccctcccctccacatatatgctaataaaccctctgctgtctctcttccacttaaatttgcggggaaatctagttagcataaaaacactgatccctgtggctggctatgctttttttttgacagattgtcctgctactgctgcttcccgtcttccttcatcattcacattatgacagacatttgagcagagtctcagtgaaaacttgtttgggggttggtgcctctgattctcagtgcagcctgccagcctcattgggaaaaggtgtttaatataggcagcgattttctgtattatgaactgaaatagaaaatgctgcgatgggttcattcaagggagacccaatatcttacttacaatgaagaaatcaggcaattttggggagtagaagtggaagtgtgactcatacatatattggtattttcttttatgagattttgatatggcacttaatgttttatgctgagaggagatgaagatttctcattttcctacaatttcactgagaaaatcatacagcaaggacacagaacttcatgcaactgccttcttttattagtacctatatcttgtctttctttcctttcttcccttccttgcttctcctttcccttttggtttctttgttaagccttttcttccttccctttatccctccttataattgattttgcttctttgtgttactactttctttccatggttcctccaacctgtagtatgaaagagagtggatatggtagtggttaagagcataggctctaaagtcagactgcctggctttgaatcctctctaccacttactgactgagtgaccttggattgagtcactgaacttcacttttcaattttttatgtcttattggataagtttcaatcagagttgaggatgaagtgagatatatgaaagtgcttagtacaaagcacatgtgttgctatcttatagtatgcagtcacgactttcatatatatattacatttatggttattccaatatatacattttgtgtagaaggcttagtctttcaattacaataagctattggtatagtttagccatctaatgctaatggaaaggagaatgggctcaattgttctaaacaaattttataacttacttatcttgggctttgaagaaaggtatgaggaaattaaccacagagatgtgtgcacacctaagagacattgaccccacttactttctttccttgctccttggctaagactcctatgtaagtgccattgttgctagaagtttgaagcttttgtaaggttttagtttttgtgattttatatcttttttcagatatttaattaaatttaatatatatttgcaatctataacaccatataaataatcatgataaatcaaaagatatattgtctggtccctggtctctcggagctgccaaggctcctagctgctgggaaagctgatgtatatgcaacttggaacataaggcagtgtttattgatgccattgatctttgtaatgggctacatgattgaaccttttttttatttcttctccttagtctttgataatgacttcacatctgtagttatctctttatatttgttgagttgctttttgctgcctgcagtattctagacattttataattagagataaagcttggaatttcctatgcaacatgttttgtattcagcctgctttcttcttcccacagttttggtctggttttgtttattagtttgttttctgcaggtagaaatacctaggaaagacaacatcatttgataaagtataaaatatgcttatttaggagagaatactttaaaaggcttatgaactcttgatgactatcctttagtttataattaacttatttttttttattatactttaatttctgggatacatgtgtagaatgtgcaggtttgctacataggtataaacataccttggtggtttgccacaccaatcaacccatcatctacattaggtatttctcctaatgctatccctcccctagtctccacccaccgacaggccctggtgtgtgatgttcccctccctgtgtccatgtgttctcattgttcaaatcccacttatgagtgagaacatgcggtgtttggttttctgttcctgtgttagcttgctgagaatgatggtttccagcttcatccatgtccctgcaaaggacatgaactcatcctttttatggctgcatagtattccatggtatgtatgccacattttcttaatccagtctatcgttgatgggcgtttgggttggttccaagtctttgcactgtaaacagttctgcaataaacatacatgtgcatgtgtctttacagtagaatgatttatatttctttgggtatatatccggtaatgggattgctgggtcaaatggtatatctggttctagatccttgaggaattgccacactatcttccacaatggttgaactaatttacactcccaccaacagtgtaaaagcattcctttttctccacgtcctctccagcatctgttgtttccagacattttaattatcaccattctaactggcatgagatggtatctcattgtggttttgatttgcatttgtctaatgaccagtggtaatgagctttgtttatatgtttgttggccgcataaaagtcttcttttgagaagtgtctgttcatatccttcgcccactttttgatgggtttctttgtttttttcttataaatttgtgtaagttccttgtagattctagatgttagacctttgtcagatggatagatggcaaaaatgttccctattctgtagtttgcctgttcactctgatgatagtttcttcagctgtgaagaagctctttgattagattccatttgtcaattttggcttctgtggccattgcttttggtgttttagtcatgaagtctttggccaggcctatgtccataatagtattgcctaggttttcttctagggtttttatggttttaggtcttatgtttaagtctttaatccatcttgagttaatttttgtataagttgtaaggaaggggtccagtttcagtttcctgcatatggttagccagtttccccaacaccatttattaaatagggaatcctttccccattgcttgtttttgtcaggtttgtcaaagatcagatgtttttagatgtgtggcattatttctgaggtctacattctgttccatttgtctatatatctgttttggtaccagtaccatgctgttttggttactgtagccttgcagtatagtttgaagtcaggtagcatgatgcctccagctttgttctttttgcttaggattgtcttggcaatgtgggctcttttttggttctgtatgaaatttaaagtagcttttttctaattctgtgaagaaagtcagtggtagcttgatggggatagcattgaatctataaattactttgggtagtatgggcattttcatgatactgattctttttatcagtgagcatggaatgtttttccatttgtttttgtcctctcttatttccttgagcagtggtttgtagttctccttgaagaggtccttcacatcctttgtaagttgtattcctaggtattttattctctttgtagcaattgtaaatgggagtttgctcatgatttggctctctgtttgtctattactgatgtataggaatgtttgtgattttcacacattgattttgtatcctgagactttgctgaagttgcttatcagcttaaggagatttgggcctgagacaatggggttttctaaatatatgatcatgtcatctgcaaacagagacaatttgacttcctctctttctatctgaatatcctttatttcgttctcttgcctgattgccctggccagaacttccaatactgtgttgaataggagtggtgagagaggacatccttgtcttgtgcctgttttcaaagagaatgcgtccagcttttgcccatttggtatgatattggctgtgggtttgtcataaatagctcttactattttgagatatgtttcatcaatacctagtgtattgagagtttttagcatgaaggggtgttgaattttatcaaaggccttttctgcatctattgagataatcatgaggtttttgtcattggttctgtttatgtgatgggttatgtttaatgatttgcatatgttgaaccagccttgtatcccagggatgaagctgacctgatcatggtgcgtaagctttttgatgtgctgctggattctgtttgccagtattttattgaagatttttgcatagatattcatcagggatatcggcctgaaattttttcgttgtgtctctgccaggctttggcttcaggatgatactggcttcataaaatgagttagggaggactccctctttttctattgattggagtagtttcagaaggaatggtaccagctcctctttgtacctctggtagaattcagttgtgaatctgtctggtcctgggccttttatgattggtaagctattaattactgcctcaattcagaactttgtattggtctatttagggattcaatttcttcctgatttagtcttgaaagggtgtatgtgtccaggaatttatccatttcttctagattttctagtttatttgcatagagctgttcatagtatactctgatagtaatttgtatttctgcgggatcagtggtgatatcccctttatcattttttattgtgtctatttgattcttctctcttttcttctttattagtctggctagtggtctatctattttgttaatcttttttaaaaaaaaacagctcctggattcattgattttttgaagggtttttcatgtctctatctccttcaattctgctctggtcttagttgtttcttgtcttctgttagcttttgaatttgtttgctcttgcttctttagttcttttaattgtgacgttagggtgtcgattttagatcattcctgctttctcctgtgggcatttggtcctataaatttccctgtaaacagtactttagctgtgtcctagagattctggtacattgtatctttgttctcactggtttcaaagaacttatttatttctaccttaatttcattatttacccagtagtcattcaggagcaggttattcagtttccatgtagttgtgtggttttgagtgagtttcttaatcctgagttctaatttgctctgtggtctgagagactgtttgttatgatttctgttcttttgcatttgctgaggagtgttttacttccaattatgtggtcaattttagaatcagtgtgacaaggtgctaagaagaatgtatattctgttgattttgggtggagagtcctgtagatgcctattaagtctgcttggtccagagctgagatcaagtcctgaatatccttgttaattttctgtctcagtgatgtgtctaatattgacagtggggtgttaaagtctcccaatattattgtgtgggagtctaaaagtctctttgtagttctctacaaacttgctttatgaatctgagtactcctgtattgggtacaaatatatttaggatagttagctcttcttgttgcgttgatccctttaccattatgtaatgcccttctttgtctttttttgatctttgttggtttaaagtctgttttatcagaagttaggatggcaacctctgcttttttatttgctttccatttgcttggtaaatattcctccacccctttgttttgagcctatgtgtgttgttgcacgtgagattggtctcctgaatacagcacaacaatggatcttgcctctttatccaatttgccagtctgtgtcttttaattggggcatttatcccatttacatttaaagttaatattgttatgtgtgaatttgatcctgtcattatgatgctagctggttattttgcccattagttgatgcagtttcttcatagtgttgatggtctttacagtttggtatgtttttgcagtggctgttactggttgttcctttccaaatttagtgctttcttcaggagctcttgtaaggcaggcctggtggtgacaaaatctctcaggattgggttgtctgtaaaggattttatttctccttcacgtttgaagcttagtttggctggatatgaaattctgggttgaaaattcttttcctgggggaggagccaagatggccgaataggaacagctctggtctacaactcccagtgagagcgtcacagaagacgggtgatttctgcatttccatctgaggtactgggttcatctcactagggagtgccagacagtgggcgcaggtcagtgggtgcatgcaccatgcgcgagccgaagcagggtgaggcattgcctcactcgggaagcacaaggggtcagggagttccctttcctagtcaaagaaaggggtgacagacagcaccgggaaaattgggtcactcccacctgaatactgcgcttttctgacggccttaaaaaacggcaccaggagattatatcctgcacctggcttggagggtcctacgccaacagagtctcgctgattgctagcacagcagtctgagatcaaactgcaaggtggcagcgaggctgggggaggggcgcccaccattgcccaggcttgcttacgtaaacaaagcagccaggaagctcaaactgggtggagcccaccacagctcaaggaggcctgcctgcctctgtaggctccacctctgggggcagggcacagacaaacaaaaagacagcagtgacctctgcagacttaaatgtccctgtctgacagctttgaagagagcagtggttctcccagcatgcagctggaggtctgagaacgggcagactgcctcctcagatgggtccctgacccctgacccctgagcagcctaactgggaggcacctcccagcaggggcagactgacacctcacacggctgggtactccaacagacctgcagctgagggtcctgtctgttagaaggaaaactaacaaacagaaaggacatccacaccaaaaacccatctgtacatcaccatcatcaaagaccaatagtagataaaaccacaaaaatggggaaaaaacagagcagaaaaactggaaactctaaaaagcagagtgcctctcctcgtccaaaggaacgcagttcctcaccagcaacggaacagagctggatggagaatgactttgatgagctgagagaagaaggcttcagacaatcaaattacgctgaggtactggaggacattcaaaccaaaggtaaagaagttgaaaactttgaaaaaaattgagaagaatgtataactagaataaccaatacagagaagtgcttaaaggagctgatggagctgaaaaccaaggctcgagaactacatgaagaatgcagaagcctcaggagctgatgcaatcaactggaagaaaaggtatcagcgatggaagatgaaatgaatgaaatgaagtgagaagggaagtttagagaaaaaagaataaaaagaaaagggcaaaccctccaagaaatatgggactatgtgaaaagaccaaatctatgtctgattggtgtacctgaaagtgacggggagaatgggaccaagttggaaaacactctgcaggatattatccaggagaacttccccaatgtagcaaggcaggccaaaattcagattcaggaaatacagagaatgccaaaaagatactcctcgagaagagcaactccaagacacataattgtcagattcaccaaagttgaaatgaaggaaaaaatgttaagggcagccagagagaaaggtcgggttaccctcaaagggaagcccatcagactaacagcggatctctcagcagaaactctacaagccagaagagagtgggggccaatattcaacattcttaaagaaaagaattttcaacccagaatttcatatccagccaaactaagcttcataagtgaaggagaaataaaatcctttacagacaagcaaatgctgagagattttgtcaccaccaggcatgccctaaaagagctcctgaaggaagcactaaacatggagaggaacaaatggtaccagccactgcaaaatcatgccaaaatgtaaagaccatcgagactaggaagaaactgcatcgattaacgagcaaaatagccagctaacatcgtaatgacaggaccaaattcacacataacaatattaactttaaatgtaaatggactaaatgctccaattaaaagacacagactggcaaattggatacagagtcaagacccatcagtgtgctgtaatcaggaaaaccatctcacgtgcagagacacacataggctcaaaataaaaggatggaggaagatctaccaagcaaatggaaaacaaaaaaaggcaggggttgcaatcctagtctctgataaaacagactttaaaccaacaaagatcaaaagagacaaagaaggccattacataatggtaaagggatcaattcaacaagaagagctaactatcctaaatatatatgcacccaatacaggagcacccagatgcataaagcaagtcctgagagacctacaaagagacttagactcccacacattaataatgggagactttaacaccccactgtcaacattagacagagcaacgagacacaaagtcaacaaggataccctggaattgaactcagctctgcaccaagcagacctaatagacatctacagaactctccaccccaaatcaacagaatatacatttttttcagcaccacaccacacctattccaaaattgaccacatacttggaagtaaagctctcctcagcaaatgtaaaacagaaattataacaaactatctctcagaccacagtgcaatcaaactagaactcaggattaagaatctcattcaaaaccgctcaactacatggaaactgaacaacctgctcctgaatgactactgggtacataacgaaatgaaggcagaaataaagatgttctttgaaaccaatgagaacaaagacacagcataccagaatctctgggacgcattcaaagcagtgtgtagagggaaatttatagcactaaatgcccacaagagaaagcaggaaagatctaaaatggacaccctaacatcacaattaaaagaactagaaaagcaagagcaaacacattcaaaagctagcagaaggcaagaaataactaaaatcagagcagaactgaaggaaatagtgacacaaaaaacccttcaaaaaattaatgaatccaggagctggttttttgaaaggatcaacaaaattgataaaccgctagcaagactaataaagaaaaaaagagagaagaatcaaatagacgcaataaaaaatgataaaggggatatcaccaccaatccgacagaaatacaaactaccatcagagaatactacaaacacctctacgcaaataaactagaaaatctagaagaaatggataaattcctggacacacacactctcccaagactaaaccaggaagaagttgaatctctgaatagaccaataacaggctctgaaattgaggcaataattaatagcttaccaaccaaaaagagtccaggaccagatggattcacagccgaattctaccagaggtacaaggaggagctggtaccattccttctgaaactattccaatcaatagaaaaagagggaatcctctctaactcatttgatgaggccagcatcatcctgataccaaagccaggcagagacacaaccaaaaaagagaattttagaccaatatccttgatgaacattgatgcaaaaatcctcaataaaatactggcaaaccaaatccagcagcacatcaaaaagcttatccaccatgatcaagtgggcctcatccctgggatgcaaggctggttcaatatacgcaaatcaataaatgtaatccagcatataaacagaaccaaagacaaaaaccacatgattatctcaatagatgcagaaaaggcctttgacaaaattcaacaatgcttcatgctaaaaactctcaataaattaggtattgatgggatgtatttcaaaataataagagctatctatgacaaacccacagccaatatcatactgaatgggcaaaaactggaagcattccctttgaaaactggcacaagacagggatgccttctctcacccctcctattcaacatagtgttggaagttctgaccagagcaattaggcaggagaaggaaataaagggtattcaattaggaaaagaggaagtcaaattgtccctgtttgcagacgacatgattgtatatctagaaaaccccaatgtctcagcccaaaatctccttaagctgataagcaacttcagcaaattctcaggatacaaaatcaatgtacaaaaatcacaagcgttcttatacaccaacaacagacaaacagagagccaaatcatgagtgaactaccattcacaattgcttcaaagagaataaaatacctaggaatccaacttaacaagggatgtgaaggacctcttcaaggagaactacaaaccactgctcaaggaaataaaagaggatacaaacaaatggaagaatattccatgctcatgggtaggaagaatcaatatcgtgaaaatggccatactgcccaaggtaatttaaagattcagtgccatccccatcaagctaccaatgactttcttcacagaattggaaaaaaaactactttaaagctcatatggaaccataaaagagcccgcatcaccaagtcaatcctaagccaaaagaacaaagctggaggcatcacactacttgacttcaaactatactacaaggctacagtaatgaaaacagcatggtactggtaccaaaacagacatatagatcaatggaacagaacagagccctcagaaataatgctgcatatctacaactatctgatctttgtcaaacctgagaaaaacaagcaatggggagaggattccctatttaataaatggtgctgggaaaactggctagccatatgtagaaagctgaaactggatcccttccttacaccttatacaaaaatcaattcaagatggattaaagacttaaatgttagacctaaaaccataaaaaccctaggagaaaacctaggcattaccattcaggacataggcatgggcaaggacttcatgtctaaaacaccaaaagccatggcaaccaaagccaaaattgacaaataggatctaattaaactaaagagcttctgcacagcaaaagaaactaccatcagagtgaacaggcaacctacaaaatgggagaaaattttcacaacctactcatctgacaaagggctaatatccagaatctacaatgaactcaaacaaatttacaagaaaaaaacaaacaaccccatcaaaaagtgggtggacatgaacagacacttctcaaaagatgacatttatgcagccaaaaaacacatgaaaaaatgctcaccatcactggccatcagagaaatgcaaatcaaaaccacaatgagataccatctcacaccagttagaatggtgatcattaaaaagtcaggaaacaacaggtgctggagaggatgtggataaataggaacactttcacactgttggtgggactgtaaactagttcaaccattgtggaagtcagtgtggcgattcctcagggatctagaactagaaataccatttgacccagccatgccattactgggtatatacccaaaggactataaatcatgctgctataaagacacatgcacacgtatgtttattgtggcattattcacaatagcaaagacttggaaccaacccaaatgtccatcaatgatagactggattaagaaaatgtggcacatatacaccatgcaatactatgcggccataaaacatgatgagttcatgtcctttgtagggacatggatgaaattggaaatcatcattctcagtaaactatcgcaagaacaaaaaaccaaacaccgcatattctcactcataggtgggaattgaacaatgagaacacatggacacaggaaggggaatatcacactctggggactattgtggggtgggggtaggggggagggatagcaatgggagatatagctaatgctagatgacgagttagtgggtgcagcacaccagcatggcacatgtatacatatgtaactaacctgcgcattgtgcacatgtaccctaaaacttaaagtataatataaaaaaaaaggaaaaactagagtataaatgaagtgtcaaagatgttaagaaacaggatcttttaaaaaattgtttttaattattatgggtacataataagtgtatatatctatgggatacatgtgaaattttgatacatacaatatataataatcttattggggcaattggggtgtccatcacctcaggcatttatcatgtcttgtattagaaacagtccaattctcctcttttagctatttgaaaatatacaataaattattgttgagtataaaaaaaaagtccacacctagtcatattatgttcaaatcacagaaaactaaagacaaccagaaaacatgaaagaagctacagaagagaagaaatttacctaaggagggacaaggataagaattacatcagaaatctcattggcaaccatgcaagaaagaagaaggtagcgtgaaatatttaaagtgtttaaaggataaaactagaattctggatacagtgaaactatccttcaaaagcaaagaagaaatgctttctcagacaaaggctgaatctgtcaccagtagacctgccttgaaataaatgttgaaagaaatttttcggtcagaaatgaaatgacataggtcaaaaactgaaatctacgtaaagaaaagaagagctttcaagaaggaacaaatgagcataaaataaactctttaatattccttaaccttaaaaaaaaaaaaagaaaattccttcctttaagagtggccccctctcttttctgtcttgtagggtttctgcagagagatccactgttagtctgatgtgcttccctttgtgagtaacctgagctttctctctggctgtccttaacattttttcctccatttcgaccttggtgaatctgatgattatgtgtcttggggttgctcttctcgaggagtatctttgtggtgttctctgtatttcctgaatttgaatgttggcctgtcttgctgggttggggatattctactggataatatcctgaagggtgttttccaacttggttccattctcccatcactttgaggtacaccaatcaaacgtaagtttgtttttttcacatagtcccatatttcttggaggctttgttcattccctttcattcttttttctctaatcttgtcttcaccctttctttcattaaattgatcttcaatctctgatatcctttcttctgcttgatcaatttggctattgatacttgtgtatgcttcaggaagttcttgtgctgggtttttcagctccatcaggtcgtttatattcttctctaaactgattattctagttagcaattcctctcaccttttttcagtgttcttagcttctctgcattgggttagaacatgcttctttagctcggagccatttgttgttacccacattttgaagtctacttctgtcaatttgtcaaattcattctccatccagttttgttcccttgctggtgaggagttgtgatcctttggagaagaggcattctgatttttgtaattttaagactttttgcactggttcctccccatcttcatggatttatctacctttggtctttgatgttggtgacccttggatggggtttctgactggacatcctttttgttgacgttgatgctactcctttctgtttgttagttttccttctaacagtcaggcctctctgctgcaggtctgctggagtttgctggatgtccactccagaccctctttgcctgggtatcaccagcagaggctgtagaacagcaaagattgctgcctgttctttcctctggaaggtttttcccagaggggcacccaccagatgccagctggatctctcctgtatgaggtgtctgtcgacccctgctgggaagtatctcccagtcaggaggcacgggggtgagggacccatttgaggaagcattgtgtcccttagcagagctcaagcactgcgctgggagatccactgctctcttcagagccagcaggcaggaatgtttgtctgctgaagcagcgcctacaggcacctcttcccccaggtgctctgtcccagggagatgggaattttatctataagcccctgactggggctgctgcctttctttcagaagtgccctgcccagagaggaggaatctaggaaggcagtctggctacagtggctttgtggagctgagcccagtttgaacttcctggtggctttgtttacactgtgaggagaaaaccgcctactgaagcctcagtaatagcagacacccctcccctcaccaagctcaagtgtcccaggtccacttcagactgctgtgctggcaacaagaaatttaaactagtggatcttagcttgctgggctccacaggggtgggatccgctgagctagaccacttggctccttggtttcagccccctttccacagttgtgaatggttctgtctcactggccttccaggtgccactgtggtatgaaaaaaaaaaaaaatcctgcagctagctcggtgtctgcccaaacagccacccagttgtgtgcttaaaacccaggatcctggtggtgtaggaacccaagggaatctcctggtctgcaggttgcaaagactgtgggaaatgtgtagtatctgggccggaatgcaccattcctcacagcacagtccctcatggcttcccttggctagaggagggagttccccaaccccttgaacttcccaggtgagttgatgcccaaccctgcttcagctcacacgccgtggtctgtacccactgtctaaccagtcccaatgagatgagctgggtatctccgttagaaatgcagaaatcacctgccttctgcattggtctcgctgggagctgcagaccggagctgttcctattcggccatcttgccagccagccactgtaattcacttattttcaaatgttaccattagaactgtataccatattacaagtttcaaacactatcctgccagggcacaaaagagttcctagttgccttaaagaattagctattgtttcatctgtgtgtggcttcgtctcagagggtgattgaaacatgacaagaagtgatttttttttctcaagagaaatggaggctttggacattagtgtcatagcaatgtcatgtagaacatacatagagaattctatgaagaaatcagccaagccgtgactatcgaccaaaattttcaactttcaacaatgagatgaatatactatctatatatctaataatccaaagcttcatttatgaacatattgcttctcaaaataaaaatttggagcagtttgtgatttaatgatggaaattttttataagaactataatggcagttaaattataaaactgaagttactaatatgaatcagtgagcctttcatgagcttttattttaaccagctaaaatactaaaatacttttattttaatcagctaaagcattcaacttatagtgaggagagttttgttttcaacacagttacgaaagaattcgggctcacttaattgtaaataaaaatcttaaagaagaaaccattgtttaaaatgttacctcattgagtttttcagtaaatggaacaagaattaacatttagggtaataatagtttatgtctgtttttaattatcggacagaatacttagggaatggacagaggcagtaaagaaaaatagttcattatattataatgtatcattagttttgaatgtgcatacacctaatattaactgtatgtatagtacacaattggtcattttatttttaaaatattacctcatatcaataatcctaatttaaatggttaagaacatggaaataatttccatgaagtatgcatttctgagtaatggttgtatataaccaaaatgaaagctaattaattcatttggtgaaagttatagtgagataaagcacagactgtagacatatacaacattaattaggacaatgttattctacatctacaggtggaatttccacccaacctggaggctcatcagcatttaccttttattcaaaggggaaattggtgagagagtagaggcagataatcacagcatcccactctactagaaaagcaagccacagctcccatcctgctggtgatgtgacagcactggtctttctacacagcagcacactagtaccaaaaaagaggctttgctttttctgtgtgatgagctgtaaaccttcatattagaaaaactcagaaaagaattttgcttagacgctaatcaaatacaaaaattgtggctgatggaaactacacatagataaattagtccaatattcttctacttgtgaaatttaaataacttcatcttaagaaataaaggtaattgggaaaattgaaaaggaagtgtttccagttttgatagagtgaatggggcattcaaaatatatttctaaatgaatgataaaaataaaatacttgcaatattatcagaatttatttccacaataaatatgttcaggaatgttaagtggggaagcctgggcagccattgtgctgtaactggctctgtttattttttgctcttcaaaagagaaagaaaggaaccttagcacaatagcagaatttcctgatggtggctattacaattttaccactgaggaaaggacatctatgggtctttgaaaagctaggaaacatcttgaatatcagaaattgtaaatgaatactacttggtgtagattaaactaaagacatgggattatatggtctcaaagccacagatgtagttgggtcctaagaaccttgtcatatatatctatattttttattttttttattttttttcttttattattattatagtttaagttttagggtacatgtgcacaatgtgcaggttagttacatgtgtatacatgtgccatgctggtgtgctgcacccattaacttgtcatttagcattaggtatatctcctaaagctatccctcccccctcccaccaccccacaacagtccccagtgtgtgatgttccccttcctgtgtccatgtcatctcattgttcaattcccacctatgagtgagaatatgtggtgtttggttttttgttcttgtgatagtttactgagaatgatgatttccaatttcatccatgtccctacaaaggacatgaactcatttttttatggctgcatagtattgcatggtgtatatgtgccacattttcttaatccagtctatcattcttggacatttgggttggttccaagtctttgctattgtgaatagtgccacaataaaacatacatgtgcatgtgtctttatagcagcatgatttatagtccctttgggtatatacccagtaatggcatggctgggtcaaatggtatttctagttctagatccctgaggaatcgccacactgacttccacaatggttgaactagtttacagtcccaccaacagtgtaaaagtgttcctatttctccacatcctctccagcacctgttgtttcctgactttttaatgatcaccattctaactggtgtgagatggtatctcattgtggttttgatttgcatttctctgatggccagtgatggtgagcattttttcatgtgttttttggctgcataaatgtcttcttttgagaagtgtctgttcatgtccttcactcactttttgatggggttgtttgtttttttcttgtaaatttgtttaagttcattgtagattctggatattagccctttgtcagatgagtaggttgcgacaattttctcccattttgtaggttgcctgttcactctgatggtagtttcttttgctgtgtatatggaactaaaaaagagcctgcataagccaaaagaacaaagctggaggcatcacactacctgacttcaaactatactacaaggctacagtaaccaaaacagcatggtactggtaccaaaacagagatatagatcaatggaacagaacagagccctcagaaataacgccgcatatctacaactatctgatctttgacgaacctgagaaaaagaagcaatggggaaaggattccctatttaataaatggtgctgggaaaactggctagccatatgtagaaagctgaaactggatcccttccttacaccttatacaaaaatcaattcaagatggattacagacttaaacattagacctaaaaccgtaaaaaccctagaagaaaacctagacattaccattcaggacataggcatgggcaaggacttcatgtctaaaacaccaaaagcaatggcaaccaaagccaaaattgacaaataggatctaattaaactaaagagcttctgcacagcaaaagaaactaccatcagagtgaacaggcaacctacaaaatgggagaaaattttcgcgacctactcatctatattttttaatggatttaaccagcaagaaagaccatggagccacctaaatttttccaaaatctgcaaaatgaaggtgatataaatatgtcacttagacaatatttcatttttgatataaaattttattttttatcagtttgataatatgcataggactaaaaaatgcagttgtcttaaaatattttagggttgcttaggaaatcactttaaaaataaaaagtgtcagaataaaagttgtctgcttatgttccatatttcagaactacctttgatttctttagctaaacaatattgcacataaataggttaggaattatagactttcagatgtgctacctgtctcccttcaaaacactcatttaggtaatgtattaattatttttagaatcacctgtcttctctgcttcagcaaaaaccccaccagggcagagatcactctccctcttgtttgctttgaatttttatgacttagcacagtgattggcacataaacattattaaaaccaatgaatgaggaaagcaacgaataagtaaacaaatgggcccagactaaaaagtaagttatatgtattagtgagagtcaataataaattaatgaaataatcttttatttgaaactgaagcaaattaagggaaatttatgaaccttaaatctttttgtaaagatctagtaccaataagataaaaaaaatgctcatccttttttccattgaaatgttatgttcaaatgagctttgtttctatactttatacatcaattaagctgaattcataggtgctaagcattttaacatattgtattgcatgtaatattccctaatgccccaaacttcaagattatataatggcttactctctccctgtccctacccaccagatagtgttatccacatacattctcatctagttttgttctgtgatgaaaaaccatatgcgtatcctattcctatgtgaattaacctggcatgcaggtaactgaagtgcatgtgatctggtctctgctgacatatcacaatgggcccccctccttgcatggaggtagcgttttttataagacaaaatgtttttaaatagaacacatttcagatttcagattttatatgtattttgtgtttttcctccctctacccctttccaaaattatgaatgaaattctaggaccatttatagacaaagcacagtttagtccgagtaaaccaatggaccctgaagtgtccaagtcagagtttatttgcagaatttaattcattcccacagagataggcaacccaggcctgtgaggacacgagggtaactaggcaacaaagtgccgtagtcaggcttgtgtttgctttttggtaagaggacaacattgacttcagtgtcagggcataaaggagactcaggacttattaatttttttccccataattctgtgaactttgtgaattccctaatattcttttaacaagagttcggagacatgagtttatgtgccttcttggatatattcacgggagtttgcagagaaagttgaataaattattaggttaatggcctgtgtaaattcaccaacaccttttcactatctcatcaatcatcctgtttgagttattgtgattcactctgctgatgagctcacacccttttttcctgatacaggaattattgtacaccaggggactggattttaaacaaaacgtattccttagaataacttgaacaatggattggtgggtccttacactattatgtgctgtgtagctgtacaagtgtgtctgcatgagctttaggacattatttgagatattttaagctatgtgtacctcatgaacttgtagctgattttccttagttcttttaaaatattttctcagaaaaccaacagtaaaatctatcaggttcacatgaatacactcatttgtgtcatatcaacccaaaatgaatatgatcttccaggtaatgatgaaggatgataactataatatttccagccaaactttattttgaaacatcactcagtgtttcacatgtttagtggctgttaaattctatatgtctaagcaaactgtgaagagcataattaacttatttggttgttgtgtatcttttaaaatcacagtttgaatctgctgggaatgttatagtggcactagtagcaaaggaatggcaaggatgttaagactttctcatgctaagaccccagcttggtattgagtttttaggaggggcccgcatgacatctctaattgctttggcaatccaattattgagacaagtaagtgagcccatcgggtgcctcccaaggaattaacttggtcatttgatataatgttgcactctccctatttgggaggaggggtggccaccctcacctctgccattgaagattaacccactacaaattttcaaaaatataatatctaatttattacacagactatcatatgggtttcataatccttaagtatctctaaattttattattattttagatttttaaataagactccacctaacttgatggaaggaaaagggggtctagaagcatacagagtttggctcttggttctcagagtgactcgccatgtgaacatgggcaagttatttaacttctttgagccttttgaattttaatctgtaaaacagagacaaaaatgccttcctcagagggtgaaaataaggattaagtacaataatgaatgcaaaatacctggcagaggacctaccttgatgtgctattctcaacattgatatttaatcagtatacacaagtatgcccttttttttttttttgagacggagtctcgctctgttgcccaggctggtgtgcagtggcgccatttcaactcactgccacctccgcctcctgggttcaagcaattctcctgcctcagcctcccgagtagctgggactacaggcatacgtcaccatgcccggctaatttttgtatttttaatagagactgggtttcgccatgttggccaggctggtctcgaactcctgacttcaggtgatcctcccgcctcagcctcccaaagtgctgggattacaggtgtgagccaccgcaccctgctgcatgcacattttgcctggatgatcttccaggctaccatgtggatctctctcatacagcagagggagagttgtacagcaatgagggcttcagaactgtgtctgacccatgctgattgctcagtgcccctgagcacaagtttttaaacattttgaatctcacccataatatttctcatcttgcagagacagagagcattgtggctatataatgcaggtaaagtacctagtgtaacgaataacatgcggaaatgataaatatcataagttgtattactgcctgtggtagtctgaataatggtcctcaaaagatatccaagtcttaatttccataacctgtgaatatgtaaccttatatgtcaaaaggaactttgcagatgtggttaatttaaggatcttgagatggggggattttccttgatgatccaggcaggccctaaatgtaattataaaggggccttttaagagagaggcaggaaggtcaaaggcagaagaaggcaatgtgacagcagaagtagaaattggtgtgaagccgcaagccaaggcatgcaatgctgaaagcctctagaagctggaagaagaaagggatgaatcccccattggcatctccagaagcaattaatcccactgacatcctgattttagcttagctctgtaagactaattcaggacttctgacttatttgtggtgttttaaaccactcagtttgtgttaatttgttgtaagggcaatgggaaatgaatgcacttcccatccataaccctgtctctagctatgttgaagtctttaccatcccccaaatctgacttttacttgcatgcttcttgcctttacatatctgcttttccttcctgcttcttcctatctcccacatcattgcctttctcacaacttctctactcagcaaattcctgcttatcctctgagagggaggacaagatcatctcagatatagtttgctagctaagaaaagagtcctgagactgctttgaaatcttgtggtcctttatccatagctcatgtaaataactctgagctagcagtgtatattatttttatttcatcctggaactatgtcttagcaatatttttattggagaaaaaactgagagcaaactctctgtttcccacatgcctattgccaaatttctctgggtgctttactttcactgcactgattctagaaattgtattgacaactgtgttctaagatgaccctttgattcatccagatggtgtgaaaatgttcctcttcaaaaaccccacactgcttttcaacatcctaatgggtagaatctctaaatccttagggtgtcaacaaaagcaaagggcatatttacacttcagttgggtgaaattaattagcatggaagttaatatttacaattaatggagattacctgactttaatagtgagattgtgtagctactttgtatcactcactctttttttgttgttgttttagaaattgtggcaaaaaatggataaaataaaattcacccttttaaaacattttttgaattcctggagtgtaaaagtggtaggataaccaaaacatcctctttcttgttgaaccatcaacaattgtcttttgaaaagaggtttgaatatcttttctttgaaaatcctcgtgcaaaacttcacaccatgatcatttatgaggtagttatcagacactggagatgaattactggggatttttgtgttctggttctcagtatacaaccaaaggtagaatattgacattgaaaataaatgtcactcgtttctcaaggaaaatttgtagtttaccgaacaacagcacaaatgaaagctgagatactttaccagtgatattgtaggtctcagtgagtaaaaactcaattaaaagtatattggggtggcgggggcactgtgtatagatagacctggacatgatctctaatcacaaatgctacttttagaagggccagattcttgatacagagacattttatttggtggcaataaccatggcttgtccacagaatgatgccgtattattctcctgacctaacttcaaagaaataaagagtttgcaagaagaactgcagttcttcaaagtacgcaatatggatttccaagatgaatgtagtttctctctctgaggaattctgaacagtggtaaagtttcacaagtttatgcatatcttttgctctacatccttccctaaaagaacttgtggcaacaaacaaagggaaagaaataacattttttaataactatgtggaaagctctatagtaagtgcttcacatgttacctcatttaattcttacaactaccttatctagtaaattatctcccatttgacactttaaggaagcagctaagagatgtttcataactttcctagaaaaggtaggatttgaatgcaggtttgtattattccaaagctcacaatgtgctttacgcaacatcaaagtaacatattgcgggaatgagtacctttcccatttaaaacaaatgagtcctggaaactcttaccctgtttagttatggaatggctcagaaaatagaaagtgttgagatcatcaaagagagaagttaacaaagagcattgtaatccagaaataagaacgcaatagagaagtagaagttgtgtggctaattttaccaaactaaatagcctgaattattcagtgtgactatacacattgatcaaattaaatgagcataccatagtctaaaggggacgagatttatattctatccaagaagtcattaattatgtttgtactatcttcatcatggttatcatttttcttagacatagcctaatctataagattttactgtatttccctgaattactaaattcttctatttttgaagttttactaagattttattgtatttccctgaattactaaattcttctgtttttgaagttttactaaatacttcagaagctttactaattaaaaaggtaatttataatgtttatcactaaccagttgataataaagcgcttccttatagcttcttaagataatagctagaaaacaaagctgattttaattattcttgtaatttgcttcaacttcactgacagtctgttgtatattttctgcatatgtaattacatcaggttttgactattttctctgaggtaaataattccaattactttaacctgtcattgtttctctttctctctcatttctttctctctccctccctctctctttctcttattataagacatattatttgtttaattttaatagctattccagcagttaaatattcttatcataaatttcttgcaatttttaaatgtggaattccagtacaaaactttggtttagcagtaggtaaaaagatagattgaaatttatgtaaacatattattcttcatcaggcagggctagctgactgacatctgctttggtttggattcaaatacagatttaaagggaggctatacatggaaattatccccaggctcctccccgctgctgttcccaatttctgcagcagcctgcatgcttgtatttaggattcaccaatttttttggcccttgtgtgtgcttggcttttgttttgatttactctacaatggcaggatgttctgggaactgatgtgatgaagtaaaggaaagcaaatagcctttgtcatgtttaatttcccttaaaatctatttgccagtgaaaggcctttaaaatttttcattataattaaatgtttgttaaagcaaaaagcctcttcttgtatctatagactaaatcagggtttctttaatcataggtggttaatcctcactactcctttacccaaatacatttcataagatgctaaagatgtcaaggaaaattcatatctctgactaacagaaaatattctttcacaaataaaatgtgaagtgttcttagttgtccactattcttttaggtcctacattattctatatctattttcaacaaaagcataaattatgggaacattgaattaaaataacatgaaggtccataccatgtccctggatcagaagtctccaaatcataaaaattgcagtggtccatcaactgatctgtagatttgatataatttaagtcaaaatactgacttgtttattttgggggaacttgccaatctgggtctaaaacttacacggaaaagcaaaaattaataggccactgtagattttccttacgaggtagtgtgagtttttaaattcatttatttatttatttttgaacatttaatttaggtttggggtatatgtgcaattttgttataaaggtaaactcgtgtcacaaaagcattgaattttatgccatgttatctatggttgaaatataatagggagcgagtttattttaaaatcatgtgtctttttaagatttgatttatgctgacttcagaatgtgacgagttttagaaatctgagtgtaggaatgaatgttctattggaagtatctagtttattgctttcagctctactgatcatggatattaaccaactcttgtttttgttttttgtttttttgttttttgagacggagtctcgctctgtcgcccaggccggactgcggactgcagtggcgcaatctcggctcactgcaagctccgcttcccgggttcacgccattctcctgcctcagcctcccgagtagctgggactacaggtgcccgccactgcgcccggctaattttttgtatttttagtagagacggggtttcaccttgttagccaggatggtctcgatctcctgacctcatgatccacccgcctcggcctcccaaagtgctgggattacaggcgtgagccaccgcgcccggccttaaccaactctttaagcagtgtttggctcatggacattggggttaagtctgtgtaattagggctttaggatattgggattaattaaaccagttgctgctttaatccagcattttaggcatcaatggttgatgatgggaatgattctgtaacttgcatttatggtctaagagctcactggtgtatatacctgggttaattggggattttaggtagccagaattggaaaatagaatgcacagtatgagaaattcccccgtctctgaggatgggggatgctggggcccccgtaccatcaagtagcacatccacaactcactccatttaccacatcatcaccatcaccaccaccaacaagcacttgacctccatcctaacttcaacaatcaccttcagtctgcctaactgatgctatggaagaacaacagagactcagaagggtaagagggtggtggtggcgggtggtagatgatgaaagattacttactggtgtgaaccttcaagatttgagacaagtcttagttaatttggaaagtttattttgccaagatggcattgaggatgtgcacccctaacagcctcaggaagtcctgacaatatatacccaaggtggttagggcatagcttagttttatacattttagagagacatgagacatcaatcaatgtatgtaagaagtgcactgattcagtctggaaaggcgggacaacttgaagcaaaggcaggaagactggaagcgggaacttacaggtcacagataagtgagatgaatggttgcattattttgagtttctgattagcctttttaaaggaggcaatcagatatgcatctatctcagtgagcagaggggtgactttgaatagaatgggaggcaggttggccctaaacagttcccagcttgacttttccttttagcttagtgatttgggggccccaagatttattttcctttcacactgggtataaggtacatgatttgagtgatggataccctaaaagccctgacttcactgctatgcaatctatgcatgtaacaaaattatacttgtaccccatacatttatacaagtaaaaataaataaataacaaaaacaaaacaaaaataacaatggccctagccataaagcaatttttaatttagcggggaggacagatatgtatctaaccagttatactggaaagtggagtgagctcaatatgctaaaatagaattattgtgcatcataaatgtttaagaggagggaaagggtaatctgactggagggattgaggaagattagagaagttgtcattgacttggccttgaggcaaaacaggggtttatttattcagcaaatcaatatgtattgagtgcctagaatttaggaatcattggaagggcatactgggaagagattatattgagatcaaagatcaaaagagaaaaaaatgcaaggaagtttttagaatgttgagtcacagaagggtcttaaagcaaagaactataggaggaaagaggcagttgaggaatgtaaactaggaatatggatcaggggcatttcatggattttactcatttttatacaagtaattgggatacttccttcagtcagcggcaaccatgaaaggttttgagttgagtgaaatgaacagagcatgatttattggtggatatgttggagggaaggaaaaattatactgaggaagaccaattagaaaaatttcacaatagtttaggcaaacaatgagggcagacagacccaggatagtggctgtagaaacaaaggaacagatgtgaagaattttatacagatgtgtgttgagattgcacagtggtgaaggcagggctttgggggcacccattactcaaataatgtacattgtatccagtgtgaaaggaaaataaatcttggggcccccaaaacatgaagctaaaggaaaaagtcaagttgagagacagaaaagatagaagaaaaaggcaaagagagctcaaaggttatcagcctgacagtgataagtgattaacagaggaagagtgtctgggtccatgaaatagtgatgtatttgggcaaatagagtctatgttgtctggggtgtaagctaaaagaatcatttagcaaatggagaagtgaaataagagagaagtatttcagggtcctctgtttggaggtgaatgacagttgaggccataagaggacatgatcgtatcaggcatagaatatagaacagagattctcagaattttccaactcattcacaatacccagaacagcagaggacacgaaagttttaactcaagttatttgatggcacagttcaaaatgcaacatttctttagtatcatgtgttttgctttaaaaatatggatagattctttattccactgcatgatgtagtcacacatttcttcctgattccagcactaatggacaaggttttgctgtattgagattcatttatttaatcaacaaatctttattgagtgtccagcatgcatcagacaccattccaggccctggggatatgtctgtgactgaaactggcaaagcctgtgatgacgcttacagtgttgtgagagggagacagacaagagaccagtaatggatgagatatttcagaaaacaagtactatgatggaagtaaaacatagtgatgagatgatgagtggtggggggcaacagcaaagacatggagtcaatctaggtgcctattgacacctaggtacatatacaccatgtggtaaatatataccatggaatattatgcaatcataaaaaagaacaaagtcatgtcctttcagcaacatggatgtagctagtggccattatcctaagtgaattaaagcaggaacagaaaaccaaatacctcatgttctcacttataatgggagctaaaccctggttatacacagatataaagatggaaacaatagacactagagactccaagagggaagagggagggagtggagcaagggttaagaaactatctattgggtacaatgttcactatttaggtgacaggttcaatagaagagcaaacctcaacatcatgcaacatatccatgtaacaaacctacacatgtgcctcctgaatctaaaattaaaaagaaaaaaagagagaaggaaaaaaatggcgggggaatgagagggtatgactaaacttctctgaagaggtaacctttgaactgagccctgaataacaacgaggatacagttatactttgggacaagtcacctggacagaaaaaatttgcgtgtgtaaaggcttttaggtgtgagaagctcattagtatggagaaaaaagaagtctacagaaacatgaagcagaatgaaattgaagagtgagcacggttctgggataccatgctgagaagtagattttattttaaatgccacagcaaatcattgagggttttcagcaagaagattaaacgatctgatttaagtttgtaaatgattcctctgcctagggtgtggaaaatgtgttgcatggggctagaagtgaaaactgggaaaacagctgaggggatggctaatggacttatcatggtgttgaaagtgatgagcaaaagactaacccctaaatattattcatcgagtttatcattttcctgtataattggactgagttaaagacagctaatcacatacattcggttcagtatcactacactttttcttgtcttggtgtttcctcattctcaggactcaaattaattaagtacatgtgagcactttaaagattttatgatctgtgcatgaggaatgatgtgtgaagataaggccagaatcataaatggaaggatgatgccatgttgtcaggctgctcttgccaaaaatgtgaatgtgtctatcttactgctgagtcattggtgcacttgtctacttgtctgggtggactaaaagagtctctagtccactgtttttgttgctgttgttgttgttttgttttaaacattcccatggaaatatttagcaaggacattttcaatgaagaaatatgaatagtgatctttgtttcgtgactaatgctgtaatttttgcacatgtaaatgaactgagcctcaaattattcacattctgatatatctctattcaactctcaaactatcatttcatgttataattttgctaccatttataaaaaccatcaccacattacctttttaatagttgaatgacagtgttctgactttgagggaaaaatctgctaactagacaatcccatgtgacccacaatttgttgttaagtataaaaaataaattaactcataatatttaggatttgtttgtttgttgtttctgagatagggtctcactgtattgcccaggctggagtgtagtggtgcaatcttgtctcactgggttcaactgattgaatgcagtgagactccacctcctgggtttaagtgattaatatttagggttttttttaaatcatgatgtctttgttacttacatggaaataaactaatttatggttgaattagaaaattctaaccatgagtactatttatatttttcaggaagaatacatctagtagtggcacaagctttctaagtctcttctcattatattagaattttacctaaaataataaatattaaaaatatggtatattgtaaaattttctagctttactaaatcattttacatgctgagaaaaatcaagaaaaaaagttgttttgagtggtctcttggtaaatgcaaaacactttaaagttaagactatgtctgctttacttggagttgaatccccaggatctagcatagtggttggtattcaagaagctcaaaactttgggatgaataaataaaatcattagttgctggagtagtcgggggcataatgtctttgattcaaactattgcttccaaaggtttgcttaacatagatgtgagtctaacatttttcttctaatgctcacatcttgctgcaaacgttttcataagttctactttcaagttctttggcaatatcttgacagactactttataagtgaggccaactaataaagtagttacatcatttacatctgtatcttcagtctaataattggtataaatccaatttatcttcatattcttgattattcaacaatgctttgtcctgtaaaaatacacctcaaaaatacatctcaagtgcctctttttgaatcagaacaaatctaatctaacttgcccacacagagctccaccaaactatcccttgccaggagttctaccttccttgctgcttttgaaacaaacaaaccttgatgatacttcaagcagttttttttttctctgcttgtttgtgcgtttgaagcattgctcataaccaagattttgctctcttgccttttaacttcaaactgtttttccaaattgatttatatgttatatattcaatggatgtttccgtggaacaatttttcagagttttccactgaacagctaaataaggctcattttgtatctccaccgtgatttaaaaacctctgttttaaatgaacatcaaaatatgacttacaaatttgtggccaactgcagtgctcatttggagttccataattgtgcttggggactgttacatgatgccttaaatcaccaaatgccctgtgatgtaccccatgcttcaaggttgttctgaattcatctcagtatcttttccatttttaccacttacaagcttttgctccaaacataactgcttgtgaccacctctgtaaatttctaattgaaactgtaattttaaataaatacatctttgaaacaataaatacagagtgacagttctctaaagttagaatctctagacttattgctattttcagactagcttcaacaagaaatgcaactaagcatagtttcatgtctgtacacagaacttttgtttaagtacatttgtggtacttgaaccacatgtggttgaaccagtggttatgtgtgtgcatgttcaatcaaaaataaaataaacaattatggtttgtaagaagacacactgttttataaattctctctctctttctctctccctctcacttatagttgaattagaaaattctaaccatgaatactatttattttttaaggaaaaatccatctaggtagtagtataagttttcttagtcttttctcattatattacagttttagctaaaatagtgaatattaaaaatattgtattttgtaaaattttttagttttactaagacattgtacatgttgaggaaaatcaagagcaaaattctctgacccattttttagagaaatactagccctatggttgggaattattagtgatatctgtggtcacagtcgtgcatacgttcactttgatttgattacagtgttagtgacacttgcttccccaacaactctgatgtaccatattttccagtcactcattatatgtgaatattttctacttacaggacttaaaacatgaagtttgctgacctggaatagtatgaattattctgcttctaaggttgtttcagccagccttataatgcaactagtgtgagaagcagtgacacaaaaaagaatagagccaaacttcaggtaacacccttttaggagtggagagaaggggacctgtagaagtagagaaagaaatctgaaaaggggaaaactaggagcatcagggtgattgatgcatgtgaagcaggaagaaaggcttaaaagacattgttagtggggaaatgaagacagataagaaaagaaacaggcctttggagctgaggtctaggaaattattggtggggggaatgcaactgaaattgctaggagttgagtcaggcagctatgagcaagttcaatggtaggtataaaccatgctttcaaacaaaaaagttgaaataagaaaacaagagcccagatgctaaggacatggggaaattaagaaaacagttgaggtagagaaagaatttaaggagggctgaatgctataatagctgccattatttgactgcttattatgcaccgtggagagttctaaatgctttagctaatttaatcttcatgagacacctaagagataaatcctgctattattattcatattttggataggagattaaggcacagagaggtcgtacaaacaagtgagtgtcaggattcaaagaaggaggttttgctccagaggcctcctgaatttaaccactgtgctagagacacagggacattcaatggagcattaatgtcccgagctggtgacaggtcgagctgaggctatagatgtgttgaggagtcagcatcagtggaggaggaaagagatgcggatggagggagactcggtgtctttgaaatagataagagagagagacaatgtaatggtttccacttggcacagaaagaaatgccttactaattagaggaccagggagacacaagaggagcctaagaagaatggaatgaattagaatcatcactgtggagtctgtgatagggagtcaactaaagtggaaataagtaattaccaaataacaatgaggggtcagcatcggcaaaggaatatgtttgtaatagaggcttcgcagctgtatctggagcctgggagcgcaggctgagagggacattgagatgtaatgagggatgtgacatcttagacagagagagagctgggatgctctcaagaacttcattgatatccctgtctgtaatagaaagaggtaagtatagcaaaaaagttagagccataattggttttcacattttaaaaattggattatgattaaaggaaaacatttaaagaccttgtctaaaggaatataaaattcttgagtctaggcactctccataacttaaattaacttccccatttcttctacaggaatactcctctgttataaggattcaataaatatggtgactttattgttattcgaaagattatagggaactttaggaggtggtatgggtacagaggagtccatctacaaaaacgtttttagcccatcttctaagctaagctgattttggaaaaggagctcttttaaggagaataaagctacaaaaatgacctttaaaactgtcctatccagactctggctctctaaattggaatctttgacaaaaccacagctggaagacagcagccagtaatacagcagccattaatacagctccatgtccaaagaggagggatgtttgtttctactaattacacaaaaacatgcaatattcagccaggtgtgatggctcacacctgcaatccttgcactttgggagatcaagtcagaagaatcacttgggcctaggagtttgagattagcctacacaatgtagcaaggctccatgtcttttaaaaaataaaattaaggtaaaaataaaataaaaatgcaatatttactgctaagatgtgcttcttgaggatggacttgaaatggtccaccaccaggacattaaagacagggtctgctcctgctttctcctgagagaggaagaacactggttagatttacagaagtatcaataccaatattcttagtgtatttagtattcctgcatttataacagagcatccggtaattgacttgaaatttgacctcagcttttcatccagtatgctaatgatggtataaaatttacactccttacataaataaatgtaccctcaaatgtgtcattttcctgcattgacagatggatcccatgcttaaaattaccacaaattcttattctgagcagctttgcacagcactctgcatccacttttgttgtttgccacgttatagcactgcttgtgccctgagcttgcgtctcaaggtggctacagcgtgacattttccttgaagagcgataggcagaatttaattgatttcattttgcttggattctcaaaggcttctgtggctatgcctattacctaacactgctctcaggaggtataaagctgtgtccagttgttcttgttgcatgtcattgagtgacttggtgccacttgcagcagcccttcttgcattccaatgactgcattcctgaatctattatgacatagagactctagggaccaatgaggttttgtgtaggagggctaacttttattttccccttatagttcctttgtctggattttccccctttcctatctatctttataaagagaccttaaatgaaggctacagctataagatgaacaaatagctggctattaaaaatctccaaattgtcatataaatgcaaacatgatcccaaatgattggtttgaataaaattcagactttactgattggaggtgggcaattcccagttataggctgaccttccacttccttcagagctaaccctctaaacaagattaagcttatgtctaggatgggagagagaatggctggaagaaaagaagatgtttcacttccttatgttgtggcttaatgtaatggcttaagaacaataattattttttttcctcacaatttgttaggccagatcaggtattggcttggtgattcttctcttcatgtggcatcaacctagctgcattcaactggtgacaggactgggctgagctgggctgggctgggttggtctgggctggaaattccaggaagccttcactcctatctgtggtgcctcagggctcctctgtatattatcttttttctttcactgtcatagtgttctctagagaaatagaaccaataggctgtgtgtgtgtatatgtatacatacagcctgtatgtttgtgtgtgtatgtgtgtatacataaacatacaaatgaggcatgcctcattttattgtgttttgctttatggtgcttgacagatattttattttttcaccaattgaaggtttgtgaaaactctacatctaacaagtgtattgatgccatttttccacagcatgtgctcactttgtgtctcattttggtaattctcacaatatttcaaactttttcattatcattatatttgttacggtgttatgtgtgaccaatgatctttgttgttactatcataattgtgttagggtttcaaaaaccatgcctatataagattgtgaacttaagtgatagattgtgtgttttctgactgctccaccaaccatccatttagtccatttattatctctctgtctctcctcaaacctccctattctctgagacacaacaatattaaaattaggccagttaataatcctacaatggcctctacatgttcaagagttttcaatctttttctttaaattaaaagctagaaatgattaatcttagtgaggaaggcacgttgaaagctgaaataggctggaagctaagcctcttgtgccaagcagctatccaagttgtgaatgcaaaaaaataaaataaaagttcttgaagttctgaattcttgaagcaaagaagttcttgaaggaaattgaaaaataccactccagtgaacacatgagtggtaagaaagcgaatagccttcttgctcatatagagaaagttttagtggtctggacagaaggttcaaaccagccacaacattcccttaaaccaaagcctaatctcaagcaagcgccaaactctccttatttctttgaaggctgagagaggtgaggaagctgaagaagaaaagtcagatgctaggagaggttggtgcatgaggtttaaaggagagaagccatctccataacatcaaagtaaaaggtgaagcagcaaatgatgtagaagctgcatcaagttacccagacctagctaatgccattgatcacagtggctacactaaataacagatttcaatgtagaggaaacagccttacattggaagagatgtcacctaggactttcatagttagagtggagaagtcagtgcctagcttcaaaggacaggttgactctactcttagggctaatgcagctggcgactttaaattaaagccagtgctcatttagcatttcaaaaatcctagggctcttaagaattatgctcactggtttcaaagaacttcttgactactgccttaatttcattatttgcccaggagttattcaggagcaggttgttcagtttccatgtagttgtgtggttttgaatgagtttcttaatcttgagttccagtttgactgtgatgtggtctgagagactgttatgatttcagttcatttgcatttgctgaggagtgttttacttccaattatgtgattgattttagagtaagttgtcttgtggcaccaagaagaatgtatattctattgtttttgggtggagagttctgcagatacctatcaggttcacttgacctagagctgagttcaggtcctgaatatccttgttaattttctgtcttgattatctgcctaatattgacagtagggtgtttaagtctaccactgttattgtgtctaagtctcttggtaggtctctaagaacttgttctatgaatctggctgttcatgtattgggtgcatatatatttaggatagttagcccttcttgttgaattaatccctttaccattatgtaatgtccttctttgtctcttttgatctttgttggtttaaaatctgttttgtcagaaactaggattgcaacccctgcttttttccgctttctattttcttggtaaattatcctccatccctttattttgagcctttgtgtatctttgcacatgagatgagtcccttgaatacagcacactgatgtgtcttgattctttatccagcttgccattctgtgtcttttaattggggcatttaactcatttacatttaaagttaatattgttatgtgtaaatttgatcctgtcatcatgatgctagctggttattttgcagacttgttgatgcagttgctatatagtgtccttggtctttatattttggtatggttttgcagtggtttgtaatggtttctcctttacatagtgcttccttcaggagctcttgcaaggcaggcctggtggtgactaattccctcatcatttgcttgtttaaaaaggattttatttctcctttgcttatgaagtttagtttggctgctttgaaattctgggtttgaaattcttttttttttttaagaatgttgaatcttggcccccaatctcttctagcttgtagggtttcttctgaaaggtctgctgttaatctgatggacatgaacagacacttctcaaaagtagacatacatacagccaacagacacatgagaaaaagctcaacattattgatcattacagaaatgcaaatcaaaaccacaatgagataccatctcatgccggtcagaattgcgattattaaaaggtcaagaaacaacagatactgttgaggctgtggagaaataggaacgcttttacactgtggctgggaatgtaaattagttcaaccattgtggaagacagtgtggcaattcctcaaagacctagaaccagaaataccatttgactcagcaatcccattactgggtatatgcccaaaggaatataaatcattctattataaaaatacatgcacatgtatgttcattgcagcactattcacaatagcaaaggcatggaatcaacccaaatgcccaccaatgatagactgcataaagaaaatatggtacatatacaccatggaacactatgcagtcataaaaaaaatgagattatattctttgcagggacatggatggagctggaagccattattctcagcaaactaactcaggaacagaaaacgaaacaccacatgttctcacttataagtgggagctgaacaatgagaacacatggacaaagggaggggaacaacacacactggggcccattcagggggtgctaggggagggagagcatcaggataaatagctaatgcatgtggggcttaagtcctaggtgatgagttgataggtgcaacaaaccaccaggacacacatttatctatgtgacaaacctgcatgtcctgcacgtgtatccaacaacttaaaattaaattaaattaaatatgctaaatctactctctttgtgctctataaatggaacaacaaagcctgtattaccgtatttctgtctgcagcatgatatactgaatattttaagcccactattgagacctactgcttaggaaaaagagatttatttcaaaatattactgctcattgacaacgcacctgatcactcaagaactctgatgaaggtatacaagaagatgaatgtttctctcatgcctgcaaaaacaacattcattctgcaatcaatggatctaggagtcattttgactttcaagtcatactatttaagaaacacatttcatacagctatagctgctatagatagtgatttctctaaaggatctgggcaaagtaaattttaaaacttctggaaagtatttactactctagatacaattaagaacatttatgactctcaggaagaggtcaagatatcaacatttaccggcatttggaagaagttgatgctaaccctcatgatgactttgaaagtttcaaggttgcagtagaggaagtaactgcagaagtggctgaattgctgcaatttcatgataaaacttgaagagatgaggagctacttcttatgggagccaagaaagtgatttcttgaaatggaatctacatctgatgaagacgctgtgaacattgttgaaatagcagcaaaggttttagaatataatataaacttacttgataaagcagtggcagggcttgagagaactgacttctattttgaaagaagatatactgagggaaaaatgttatcaaacagcaccacatgctacagagaaatctttcatgaaaggaagagtcaatggatgtggcaaacttcattgttgtattattttaagaaattgacatagccaccccaaccttcacaacccccactctgatcagtcatcagctaccaccatttaggcaagaccctctgtcagcaaaaagagtacaagttgctgaaggctcaggtgattgttagcattttctagtataaagtatttttaactaaagtgtgtacactttttagttacaatgccattacacacctaatagactgcaggatagtgcaatgtaaacataacttttatattcactgagaaacaaaaaaattcatgtgagttactgtattacaatatttgctttattgcagtggtctgaaactgtacctgctatatctttgaggtatgcctgtgtgtatgtgtatatatatgtatgtatacacacacacaaacacacacacacacacacacacacacacagagagagagagagaacagagattattttaagaatggcgtgaacccaggaggcagagcttgcagtgagccgagatcgtgccactgcactccagcctgggtgactgagtaagactctgtctcaaaaaaaaaaaaaaaagaattggttcatttggtcatggaagttggtgagtccaaaacgtgcaggatggtccagcagactgaagacccaaggagtggattttgcaactcaaatccgaaggctatcaactggcagatttccctcttcctttgagaacatcagttgtttttgttattgttgctcttaaggccttcaattctttgagtgaggcccatccacattatggagggtactctattttactcatttactgattaatctcatctaaaaagtagtttcacggcaatatagatatgtttgaccaaatatccaagtaccatgggctagccaagctgacatataaagttaatcatcatactctctgtgtagtgtctcatcatttagcccaaagaagcttgggcttctttacagcatagcagctggcttcccagggagagcaagtgggtctgtcagacctgggctcaggagtcccgggatatcattactgttgcattctattggtgaaagaaagtcacaggtctagctcatagctaaggggaagaaaactacaacctacttcatggtgtgaggaatagcatatgtgggcagggatgaggggaatagttggagactagctatcacaatcttccctctggccacagcacttcttgtcccttttcagaaagtctcatcacattacagtgctgggcccagcttcaaggtccaaaatcacataatctaaattgggtatatttaaagttgatgttccctctttatctagatacttgtacctaaaatgataccttctgtgtaatcccccttccctgcaacatacattgatgagacagggattgttgtatcgctagcaagaaagtcagccattcaaaaggagggaaatgagaggcacatagcaatcggtgcttcataaaaattctgagatccagctgggaacatgttaccaattccctcaaatctaggtttcctgaaaaggatcctgttctctggatgtggatttctattccattgttttcagtgcctgttgactctctcctctaagttaaccttccttttctgtaagaaatggccctcattcgcaaacggagtcactttgtgagactatttattccattaaaggtttggaggcctaaaatcttcttttcattttgtcctgtcactctcccttttcttccaaggtggcacagcttctttttaaactttgtaattttctaatgtatccagttatattccattccattgggcgaaagctatttccccaagtctctttaagacagacacttttcttctttagactgagagtcagaatcctgtgcagtaacgtttttaagagtttaatcacccttgtctcctagcagagtggaacttataagggttttaagaggtatcttactaccacattcttgacttgatatttaccctgaggccacattgtactagcagtacttgatttgatcagagaccattttttactctgaaaaccttctgccatctggaggggttgagaatgagaaataatattattttctaagccagcaagtcctgagttggactttgtggattaaaataacagtttcctatttctgatgggtaggattttcctgagtatgtcttctgctccatgtggtattgattaggtaggtcacttacgtggctacatttagtcaatagctggtctgggctggatggtccaagaaagtttcagtcatatacctggcacctctgagcttttccatatggcctctatgtggaatcatcttgggcttcctaatagtatggctgattcagactggtcagacttttttttttttttttttttttaaagtggagtcttgctctgttgccaggctggagtgcagtggcatgatctcggctcacggcaacctccgcctcctgggttcaagcaattctcctgcctcagcctcctgagtagctgggactacaggtgtgcaccaccatgcccagctaatttttgtattttttagcagagatggggtttcaccatgttggccaggatggtctcggtctcttgcaggctggtcagattttttatatggaggctgactccaagggaaggtgttttaaaggaacaggcctgcccaatgtgcaagcacttatctagcatttgcttgcataatttttctaatgtgccaaagtaagtcatatggcaaggccaggatcaacatgggagaaactacatgaagtggcagtgccaagaggtagcatttattatgggtcacccatataacaatctctcacacagagtagtttggtagctggacagaaataaatttgtcatcttcttgtaccttttactagtagtataacttagggcaaattgctgtgcttctgggattcttatttgctgcttgtaaaatagaaaacatgacacagatgctactagatctttgtgacaactgtacacacatatgcatacacacacacacgaggtactcacagtggtacttaacaatggctactatgttttaatggtgtacttggcagaccagcagttaggttttgaatggactaactgtggttttatcatatcaggaccaggttgtaatcagaaatcagcgcttgcatagctcaaggtgattaaaggtaaaaaggttaaaagttgagaagaaaggttggtgttagatactattagttcttggccaaaagctgttggccttgggagaggtggaagtttgagatcagggatcacagttatatgagaacacacagtgatggtgaagtttggaaccagaaaataagtcaggattatacggggtccaaaaaagcggagtcagggcactcatgaatctaaaccagatatagaagcttatggagtcagagagcagaaatcagggacacaggcaagaaatccaggaaaacaagaattagatatacccagtatgttgagacaaatagctatggggcgcagaggcaagagaaaaatttggtagtttggagccattgtctccaaacataattatagccaaaagtaaaacatgttcacagcatgtgggcagatcttgagccataggtggaaaaagacatctggttagaatacgatggcagcaaattggtagctcctgacatgcatcagaacccctttaaattttcatgggattcaggttgttccttcaattatttcaatgatctaatctttaacttcttgagaatatgatgttttcctaaaaaggggactcccacacagaaactgtcaggctatgaagctgtcgatggcatttgtagtactcacacagttcaaaaaaatgatgctatctctgccatcttttgttccatctgtagaatagtccattttttttggttatagcagtcgtcttccttgaatggttcctacccagagggaaatcggaattgccggtactcctatgtctcagttgcagaagtcaggattttttctgaatcattctgagcatcttatctttcctcatgctgattattatttcagtctgaaagcttatgctctcttataaagtcacattgtactttcgttttccattgaaaattctgaatagaataaaatgaaatcatttaaagtcatgtttaagaaaagtagagtttcttgattaaaaaggagaaatttagagtggcattcaaaagaaatacattaaaaggaaaaagtagcatgcactcatgcagttcttgttgggaggatagtttcttttccttctcattcggcccattaaaaagttcaattaatttcttttaaagatttcaattatgaatgtatcttaggcattgatagggagtaatttttagatctgacttatttttatatattattgttcatttttatagcttttctgagattcttggcagtgagtcagcacacagcatttctacctatagtccaatttatatgagtcctactttcatgcaccactgtgatagtgatgtctcggttagtggctatcatggtcagtagcctgaagatctatagcatctacatatttagaatggatttttaatgtctatgagagcctttatttctccactacccggttcctttgtggatcctgagtctgaggagaacataactgtcaattagaaccactttttaagaattgctgtaattaagatttttgatgaccgagttattaattaggaaacagggtctccatattttgctctgctgcttctttatgtcctagagcaagggtcagcatacttttactgtaaatggcctggtagtaaatatttccagctttgtgggccacatcatttctgctacaaatactaaactgccatgtggtacaacagcagaaaaggacctatgcatagactgctgtttttaatgtcaatatagtatcagtagaaaagacagggcttaataaaaactttgtgtaatatggtctctttggcataaaattaagaaatgtatagaagtaaacgttgttacaaaaacttttgcaaatgtgtgtcgcttttcccagcactcacgaataacagtcatttttaaccagacttctcgtttttgccaagtattatttgttctcatctagtaacagtctaggacaggtgtcagcaaactactgccacaggctaaatcctgcaccttgtcttttcctctcatgccacatagatattcaaatgaggaatctatgcacaggtctttgacccacccatcagcagaacatgccctttctggagctccatttctcactctcaatagtgctgaccacttaggaggagctgtccatgttcttttgtttgaaattctctatgaaaaatgacatcttttctgaagtgattgctggaactaatggggccttttgtgtttgcagacctgttttcctcagtgaagctggcagggactggtaaggaatcagaattacaatcttgtctttattagcactgtgtttgcatcagtcctctcctgagaaacagtgcaggttgagataaatttctcctgtgaagtgatacaattcattttcatctcacatatgcatggcctttgtgccatgcagaacacactttttactgttgttgatgtaagtgagatgttattaagaggttttagtttgagtttattttagataataccaataattgaatgctttactagtgtttactacaaaggtttaaaaaatcattactacctataaaactgagtaaaataaaaatgatttagaactaaagataatctcaaaattgcacattagatagctatcctatgttgtagaagatattcagtctgcatcataatatttgaaacaaatacaacatttcaccataagacaagagcaaaatgcacaaagaatcgagtgttccatgcaataggctttatgaacacaaagcctgtggccaaaatgaggcaagaggaagtatgaggggtacacagatgtcatgtgcagtaccacataccacccctggggagtgataaacttttttgtgtatttgcatttgactgatttttactttgtgaaaacataatgtgctggggaaaatcacatctgaatccacaaaatgtccatggtatattgacatgtacccctaatttatcaattttgtatgaatgtatttgcattagagaaacatgtttcagaatacattgtgctttgcaagtgtttgcactgttgcaaactatgtgctttatctcactgaatcttcacaattactgcatgcggtgggcactattttcatgcctgttctacaaatgagtagacatataaaagttaaataacttgccagtggctttgaggaaatacgtaacagtatattagagatgggattgagttattctaattttcaggaagaagaggaaagtgaattctccccacttatgtccttagggagtaggacattaattgtatttcttttagttctttttgcaaatgttactttcacagaggcttctcatggatccctatctaaaattactccccattctatagacttttgtttaaaaaaaatagaggccacaatgtacatactccaagaccaactgccattagccacataaccaaaatttaaattatctcaattttctccaaaatactaggtctaaccataaacaaaacgtgaaatgtgagcttttcatccttgtcaacatgactcagtaaaattaaaccaatcagctgcagacaaatcagcttaaacagttttacttgtcctaaaaggaatataagtttatgatagccaaccacagcgaagacagatgcagttccttaattatgctttataagctgcattttaaatgctgtgaacagagcttcttaccacttttgatttgaggtccctggtttgcaaactgtccttttgtatgctcaataaactttaaaaaatttttctaacttgatctgattttaacacattctatctactttagtgctttttatatcctaaacacatgacgctaacattctatatagctcacttgtttatactgtttattttctcttcccctacactagtgaaattctatgaaggcaggaatgtttgtcattgtcacactactgtatttccagtgcctaatataggcactcgataaataattattgaatgaatgaatcaatcaattgattaatcttaggaaaagttctttaatggatcttaaaaaaaaatcttgtgagcctttagaaaggaaagtgatgatcacctggagcttgtattaggtcactaatagtaaagcatatcagattaaataacttacttttcccataagaccagtgtatctgaggagtgctgctccccctgtctatctgaatttcaacgtttgataaaaaccttccatgatgaacttatgcttaagatgtaggaaggcagttgatgatactgttaggcagagtaacagctgaatgcctgtattcatgaatcaatgtttagagagagacctctagtaattggctgaaggatttggtcttcacatttcctgttcaccattttcattgttaattttgagggtggtattaatggcataaggagctaatccacagatgaaataaaaatggcaggaaccactaatatggctgttaacaaaatcagcatacaaaattacttgacagactaaatgggagaggtaaatataataagacaaaatactaaaatgaaaatataaagtctaaaacaccagagggaagtaggaactaatgttgtttgaggagcaataggagcaaaggtgagacatagtttaataacaactgtaggtttaggtggtagttacagaagcataaatcaataatatgacattattccccccaaatattcattcattcttgggtttcatgaatagaactgggtttagaatagaaaaggtaatgatttggctgtaaatttatgttgcttctcccatagctagagctatgaccccaatcctgggcaattcactttaagaactttgagaagtagtgtacacctaaaacttgcaatcctcatggaaagatgagtccaaactgtgtcacgtgaagaatacctaaagctgtggttccaaacttatggccttcagatgtgttctaaatggcccatatggggtttttagaaatttgaatttgcggcagatgtttcaaaattagtagatgtctcattaaatatagatttctgggatttactcttgctactgtgagggtgtgtgatcctgtgtttgtgttcctctcagaccactttactcatttactttaaatttctggtgcctatagcaatcggggtgctaacacccggggggataaaaaaggactggggaattcatggcctgtaaaacaaggttggggttggagagatataaatatatctggagagctttcatagggcagagcaattagacccaatctttgtgtccccaaaatgttaaacactggtattaataataagaaaacatatttccattaaccatatagaataactatcttatagtgacttgagactggctattttattcatcttttgttcatcagtaccgagaagagtttctgacaatgtttgtactcagccactcttaactgaataaatgtggcaaaacaggttgcgagtggtgaattccattccaggagcagctagaatatatgctctttgagagcagagatctttgtcaattttgtttacagctatatcagagcacctaaatcagtgcctgccatgtagtaggagctaattaaatatttgtagatttcataattggagatattcaaacatagaatcatggtctacttgtcagtgctgtaggaaaaagtaattaacaatataagtagagggtcatgaaacaagggaaatactgaagtagatgacatttaaagttactgccaaccctgaaagcctatcagacagtgacatagaatgggattatgtattttacattaaatattaagcatagtaaagttaaagtagtgtaggtatgtgtggtaacaaaactgagaaagcagtttgccagttatttatttatggtatggacaggaaattattggctagatttttaaatgaaaatatccaatagttgagatttttctgatatttaactatatcttatatcttatgtccatattgatgacagtgattattccattttcaatcgttttgtgtcatctaagcagcagttaatcattcctacgtgatgcaaatatacttttattccctggtatttgtaatttaacttacaaaacacacgttgccttgaggtttggcatgatttgttattctatccttcaagaagacccatgataacaaatcaaatcattgagaactgatttcagttttcattgtttggggtggtaactgaaggtgacgttttgaaaaatcatactataactaacctagaaaataatgttcagaggccaacatgtggcaaaggaacacatagttaagtatatagtttttaatagaaattctatgcaccttttattgtgaaggtctagcattttaatattttcaaaatccagaaagatgaaaaatttctttataaacttgaagggaaaataaaaagtctaaagccctgaatttgagttctagaaatgaatgtatttaaaatgcagtcctgaggtgctgtatgctaactatgtaaagcaatagcttattaaattcttggaaacttgctgtttatttgaaattggatatggtaatagatttttgttaaatgttattttataagggataacattttctcctgcttagtttcaggaaaaaagaaaagaagcacttaatttttaaaaggttaatggatacttaatggttggattagacctatgcatcatcatgtttacagcacagaacaatgggaaaaatttctattatggagcagtgccacataaccttaatatcctgtatcatcattatcatcattattatgtgttgagtatacaagcgtctatctctgaggaatacttagcaatttatgaatttgttttaattagttttctcagccttctcatagggcatgggggacatattgcttaaccctagttttagagccagccttaggtaaaatggtgatgcaaacactgttttactttggtgactcttctgcttgcagggatacctcctttttgcacagcaccttatttctccttctgtaaactaaaggagaaaattattatacatttttatacttaaaaatacgtagttgagaatttcaaatatatgcaaaagtacagagaatagtaattggttggcgcgaaagtaattgtgtttttttgccatttaatggcaaaaaccacaattgctttcgcccaacctaatataatgcatcttaaatactcatcacccagttttaacaattctcgatatacaactagttcttgtttcatctgtacctttacccatatttccttcctctacaattattttcaaattcaatacacaatatttcttcatctgtaagtcctttagtatgtatctaaaaatagtcttttaaaaattacctcaataacattaagatgcttgtaaattttcctaaaaaatttcctaataatttcttattatcaaatgtagctgatttttaaaacaattttattaaataattttaatttttggtatgaaatggtagcaactaaggttaacagatcgaaatcattatgtgtctgaattctcttttacactataaatttcctctttctatcctttctctctgcacccttttaaaaaaactgggtcatacatcttacagagtttctcataggttcaattttgctgattgtatctctattgtgttgttcaacctgtcctttgaattttctataattattagttaaatctaaaggcttgataaatgactaatgttttattattttgagaggataagcatattttgttttttgtttccccagctttattaaggtataaataataaataaaaattgtatatatttgaggtagacatgtgatgacttgatataggtatacattgtrtaatgattaccacaataaaattaatcaatgcatccatccctataaatggttaccttattctatgtatgtatgtgtgtgtatatgtgtgtgtgtgtgtggtaaggattaagtattaaggatacttaacatttactctcttagcaaacttaaacaatacagtattattatctattgtcaccaagctgcaatattaaatccccataatgtatttgtcttataactgaaagttagtatgctgtgtccaacattaccccatttctaccatgtcccagattctggcaaccaccattctactctctgttcctatgagttcaactatgttagattacacatataagcaagatcatacagcatctggctgtctgtgtctggtttatttcagttagcataatgtcctccaggtttatccatgttttctcaaatggcaggatttgtttttctttttactgttgaataatattccattgtatatacaccacagtttctctattaattcatttgtcaatggacacttaggttggttccataccttggctattgtcaataatgctgcaatgaagacgacaagtgcagacatctcttcagcatgctcctttcatttcctttggatatatacccaaacattagagtgctggatcatatggtatctctatttttaattttttgaggaatcttcatactgttttccataatggagttaccaatttacgttttcaccgcagtgctacaagcgttcccaattctccacatagtcaccaacactttttatgaccatcctaatgggtgtgagaagataccgcattgtggttttgatgtacatttccctggtgattaatgatggtgaacaccattttatataccttttggccatttgtatgtcatctttggagaaatgtctattcaagtcccttgcctatttttaaaatgggttattggagtgtttgctattgagttgtaggatttttttgtgtattttgaacatatcaggtacactcagccctttgtatctgtgggttatgcatcaagggattcaattatctgagaatcaaaaatatttgaaaaaacataataaaacaataaaaataattaaaaagtaatatagtataattatttacatagtgtttacatagtattagtattataaataacatagagatgatttaaagtatgcaggaggatgtatgtaggttatatgcaaatactatgctattttatatgcaggacttgagcatctgaagattttggtttctgcagagggtgggaaaggttgaaccaatcccccatggataccaaggtaaaactatgtatggtttgcaaatattttctatcatccatatgtagaaaatatttcattttgctgattgtttcctttgctgtgcaaaagcttttaagtctgatgtagtcccatttattttttattttgttgcctacacttttggtatcatattaaaataataatcaccaagaccagtgtcaagaagctttccacctgttttcttccaggagttttgtggtttaatgttttaatttcttttaagcacatttttgtattgtatgtaataaaatatggatacaatttcattcttttgcatatgaacatccagttttcccaggaacatttattgaagagactattatttccccattgtatattattcatgcccttgtcaaagactaactgattatatatgcagggtttatttctgggatctctattctgttccattgttctgtgtgtctgtttttatgccagtacctcactgttttgattactatagctttgtaatatagtttggaattagggagtatgacgcttccaactttgttcttcttcttcttcttttttttttttttttttttagatggagtctcgctctgttgcccaggctggagtgcagtggcatgatcttggctcactgcaacctctgcctcccaggttcaagcaattctctgcctcagcctctctagtagctgggattacaagcacctgccaccacgttcggctaatttttgtatttttagtagagataggatttcaccatcttggccaggctggtcttgaactcctgacctcatgatccacccacctaggcctcccaaagtgctgggattacaggcgtgagtcaccacgcccagccattcttctttcttaggactgctttgggtattcagggtcttttttggtttcatatgaattttacaatggttttctctatttctgtgaaaaattccattgaaattttgataaggattgcatttaatatgtagatcccatatggacattttaacaatatgaaatctttcaatccataaatatgggatatattttcattttcattaatgtctttaagtgtagagatctttcacctccttgggtaaattcattcctaagtattttgttcttttagatattattaaatgggattgtttttcttaatttattttacagatagtttattgttagtatatagaagtgcaactagttgctgtatgttgattttatatcttgtaaatttgctgaattattttcttaattatgacagttttttagtgaagtctttagagtttttttttaaatatagaaaatgtcatctgcaaatctaatttggatgccttttatttctttttcttgcctaattgctctggctagggctttcattactgtgtkgaacacaaatggcaagagtaagcattcttgttttgtttcagattttagagaagcagctttcagttttccaccatttagtgtgatgttagctgtgggcttctcaaatatggcgtttattgtcttgaggttcattccttctattcctaatttgttgagagtttttgtcatgaaaggatgttggattttgtcaaacactgtttctgcctctatggagatgattatagatcatatgatctttatctttcattgtgttcattcggtatattacattttttgatttgtgtatattggatcatacttgcaaatctaggataaattccacttaatcatggtgaattatatttttaatgtattgtcaaattcagtttgctagtattttgtttaggacttttgcatttatgttcaccagggatactgccctgtaattttttttcttatagggtccttatctgattctggtctgttggtaatgctggcctcataaaatgaatttggaagtgttcccttctcttcactttttttggaagagtttgagaagcatttgtattaattcttaaaatgcttgctacaattcacccttgttgccacatggtcctgtgcttttctttgttaggagtttttttttttaattatggattcaatcttcttacttgctattggtctgttgaggttcatgtaatatatttccctatccctttgctttcagcctatgtgtatccttaaggcttaagtgagtctcttattgtcccaatatgagacagcattttgttggattttttttaattcattcagccactttgtgtcttttgattgaataatttaatccatttatatccaagattattatttataggtaaggagttattactgccatttaaaaaattgctttctgatgggtttgtggttcttgtgcttttttttgttgttgctgtcttgtgatttgttgatattttgtagtggtgtgctttgattccttgttgtcttttctggatctattagagtttttttttttttttcctttgtaattactatgggactttcaaaaaacatcttgtagcatcttttaattataatattttattttaagctgatgacaagttaatttcaatcacatacaaaaactctacacttttactttcccccgtcattttgtgctactgatgtcatgctttgcatctttttgtattgcatatccattaacaaattactgtaactatggtttatttttaattattttaccttttaacttttattctaaatttagaaataatttatacatcaccattaccacatgcaagtatacagaatttaattatgtatttaccttttccagtgagttgtatacttatatatgtatttatgttgttatttagcagcttttcattccaacttgaagaatcacattagtatttcttataaggcaggtcttgtggtaatgaacatcctcagtttttgtttgtctgggaatgtctttacctctccatttctgaaggctaactttgcagggtacagtattcttatttgacaggcttttttctttcaatgttttgaatatattattccatattatttatttgttatccatgtaggcttgcattggtgtctgtgaatttgaagaagcaaacagtctttcggtctttacaggctgattttaacaaccttctcttccaccaatggcagacctgttattaggtatgcagataggcgtggttccctctgggtttctggaggactccccctggctctctgagtatgtctatgggtagggagaaccgtccccagatcaacatgagagagcttggaactaagtcactgctgcttcagggtccacatctgagaggacttgcctccagggagttggatgggcatacatctctggggacaagattgaccttgggccaagtctaagtgggaatggagcaaagttatagggccatctcagaatctgctgtggaaccaagtttggcaagcctgtctccgagaacatggatgggaatgagtcctgacaggtcgctaagtggagacaggactgctctcaggccacagtttcagttttaggatatcatagttagcagacagctctatacaaaactctactcctttatatctctgcccatttatgttatcaatgtcacatattacagctttttatattttgcatttgttaacatagttttatatttatattttataattaagttctataccagagttaaaaataatttatgcaccaccattgcaatattatacgatttttatttgtctaaatatttaccttttcctttgtgttgctgtctagcatactttgtctcaactcaaaggactccttttagcaattcttgtaagtcaagtctagtgctaaagaactaccttagccattgtttatctttatttctcctccattttcaaaatacagttttgccagaaagagtatgcttggttgacagactttttctttcagcactttgaatatattgtcccactcccttctggcctataatgtttctcctgagaaatctgctaatgtcattgaaggtcgcttgcacatgatgagccattttctcttcctgctttcaggattccctttttgtctttgatatttgacagtttgattataatttatgttggtatgttggtttttccacgtttgagttttatcagtgtcttgaatttggttgttcatttccttcctcagatttggcaagtatctagccattgtttttttcaaataagctttctgtccttctctctttctatcatctccttctcagatttgcattatgtgtatgttggaacacttgatggtgtcccatatgtttcttagtctttcttcacttttcttcattcttctttttttcctctttgtatctctggcttcataattttaagtggcctctctttgagttcatttattctttcttctgcttgatggagtcatctgttgaaatgctctagtgaacttttcaactcaattactgtattcatctccatgaatgtttgttttctttttgaagtttgttgatattctcattttgttcctgcatcattttcctaatttcatttagttttctgtctgtgctctcttctagcacattgaacttctttaatattatttttaattatttgccaagtaacataaatttttatttctttctggttggtacctggaggtgtattttgttcctttgattgtgtcatgtttccctgtttctttgtgtgcctagttatttttttctgtgatttgtgcatttgaaaaagcagccacctcttcagtccttataaattggcttcatacaggggaagacttttaccaattagcccacatagagattttgggagcctctccagttttgttttgtttttttttttttttaccacgggatacatcttctttgaatttgtgtgtgttctttcccagttagagtgatttgcttctttttcttccaagagcttttaatctccttctccgtctggtgtctgtctgtaccactgcaggttctgtggcattgcaataagccactgagttaccttttgctctctgcagaccccaggcatccaaagtatgtagattccattagtgctctgaatcaggcaagacagaaaccagtctctcagacaacactctgaaaaaccagaacattggacatacattccactcttctctttctctcctaagggagaagtcataaggtgtgatttatttttcctgatgacaccaagctgtgctggcttggaggaagggctgtcatggttgacgtgaaatgccttttctcatctgtttcaatgagactattattttctttaagtttgcctcaggcactgcaacttcttgactggtttctagacttttcataaaactttttggatcatatattattgctaagttggcgtctctggtggagaattagctctctcgctgatgaaactctacagaatacttttacagtatttaatattgctcttatttcatctcacacgtacatagtcactttcctaacacttatataattgttctcttcccaatagctagtagtgtttcctgtaacacatattgacacatactaagttcttatataagaaaatatttaagggaattttgtatttttccactaaactttctgttgattatttgaaggtaccacacttttggttgttattgtggcttcatggtaaaattttatatgtattagagcaagaccgtaaccatgttatattttataacatggcctaattcctccaaaaagtaaaataaaaaactaaaaaagagatgattttcttgcaataacattaaacttagaaaattattcaaaggaacatcagtcttgattatataagtcttggaaaagttgtatagatttcttaatctaagttctacttatttctttctgagcttatttttaaacattttggttttgtttgtttttataaatgagatgttggtgtggtaattttaacaactggtctttgattttataaataaaagccttttgcatattttactttaaaactggacaaacttacctgactattcttattttcaattatttttcagttgatttttctgggtttcctacattaaactaggttgtaatcaaataaggataaagttgccttcacttttcttatagttttatgcctcctatttctattcctcacattgggttactgaatttgttagaggtttttgaaaaatgggggcaatgttacatttgggctaaaactatgaacattgatatcagctaaacctggtctcaaaactctgaaggatcctcagttagaactgagaggtcttaaaagacgaggtggctagagggaggtctgcacacacattgccatgagtcctcagaccacatgagacattcttttttgtctgaagcaaggctggagccaggcctagatggcctgtggaaagctcccatggaaccagcctgctgttctcattccaggcaaactaacctctgtacagttgatagtgtcactatggacaaactaacctgtttaagcttcatttccaaatctgtatcatgggaatagtaacagttttttgtacagtttttataagaatcaagtagctacctatacaatatatgtaatacaataaatattactaagtttctattattatcctgatcttaagcatgaacctatgctttaccagtagctataatgttaaatataagtttaatataaacattcttttgatccatagtttgtttatcaaggggatattttgtagttatctgaatatcaaagccaaaagcaaagcaacatttctggctctctgcatgtggaaagggaacttagctttactttgtctcccctttcctcccacagcccaatatttgttagtttattctagatttacatacccagtttatcattataaatatatcatcacttaaatgatggttttaggtttttctttcatgtttatacacatagttttgattggtattggtatttaaataaaacttgagaatgaagacaatagatcctttgtatttcttttaaggttgtgatttgacccctggttcctcaagtgagaaacttttcaaaacacttgagagagtaaactggctgagttttacctatacttactgtaagacataatttttagctgctaaaaaaacaatgttagtttcttttctacacttgggattctattactgtatgtaactgtgaaggaaataattgacagaactcatgtttttccttattttttttccttcctctactaacaaaatagaattgactttattttttaaagtcagccaggaaatgtacaatgctatttacaaaaggttaattgaatcctagagttgcagatcgagtttcttgttgatgagaatatacagtagaatattactgaatgagagatttttctattccttttttggaaactttttggaagttttgatgactgagttataggaaattggctttagaaggacttcagtgatttctgtctcttctaatcagtatgaaatcacagcctatatttggattatgctctgtgaatgtttgaaacctatctgttatctttgtgttaacctgaggtagaaattttcatttttatatagaattagttttgcaagagtatcttttctatatacaaatatccatttgaaaattgattgtgttaagtcgatacaatgcccttttctatattaaaggacaggatgtttattgccttgacttgtttgtttcctgtaaagttatttgggcaataatagcattcagttttaagataaaacatacataataagtaatgagacaagaggaaaaacatttggcataaggcttagagaaatttaaggctcattttccattattgctttagtgcattattaacaatttcatggggacatgaaagactaatatatggagaaaatgtctgctattggcatataatatgttaagattgcaaatatgacttttaatccactgtgataatagcctattaaattgtatcctagtccttgaagagtcactaacattatcttgtttatactacaaaattaggtacagggaaactttacttttacagaacttaatgttgcatcaaactaactggacaggaaaaaaaaggaatgtggcattggaagtgataaaacaaaacacatcctctgcctatgactgtcttcttcctggacctatctgactatttaacatgctgacctttacaatgctctgcatagtgtaggctcactgaaagcactgagtgtctgaaatccttcattcttatttaaaacaaaataggtgaaaatacttaatcatgatgtctatatatttgaaagaatatttgaacatggggagagacccaaccagtttgagtggctgaagttttggaatttttatagaaattccctattatgtgtttcaactttatgcctgacttataataatagttacaaatactacattgctagtaacaccaatatctaataccatttcctctttcctaatttcttgcagttgaagaaatggagatgagtatgtctatatgcttcactctttcctcagcaagatttatttagcatatgttttgttccaggcactggctaagtgctaggggtacaaaagttgttttgtctcccttccttccagatgtgtccatgtgtccaggctaacagagtgagtagtcacacaggcaaatcattctcctacagttgtcaggctgaaggctgacttggtgtcataaataaaaaggcagaagatatttgtattcattgtcttggatgatattttcaacttgagtaggcagattgaaaagaaaaatgcggccgggtgcagtggctcacacctgtaatcccagcactttgggaggccgaggcggtggatcacctgaggtcaagagtttgagaccagcctggccaacatgatgaaactccgtctctactaaaaatacaaaaaattagctgggtgtggtggcaggtgcctgtaatcccagctacttgggaggctgaggcagaagaatcacttgaacttggaaggcgagggttgcagtgagctgagatcatgccattgcaatccagcctgggcaacaagagcaaaactccatctcaaaaaaaaaaaaaagaaagaaagaaagaaaagaaaagagaaatggttgaaggatagcagcttggacaatgcctaggttttaaagacagttaattgaggagccagcaatgagactaaatgaaaatgactggagaagcagatagacagaaagcaaaaataaatgtccaatttatggggtgatctacatctttttttgtctgcaacagtccaggtgttctctttttgtcgatgtcacaactggctagcactttctttcaacttgcaaaagtgttatgtactccagtaaaccctaagttctctgttacagctttgatcatatactggtgattatctgtctattatatttttcctcaaatgaactgtaagtgcttaagcaaaaggaggtgcctaattcatctctgcattttcagtacccgacacaagcatcaaaggtagtaggtgctcaataaatgattaattgggaaattaataggaatggaaacacaattaagataggttgaactcctttagagatatacacataaaatagtactacctgtaacaagaaaatgctaaatttttgtggattaccccaacagaagattatctgtggctcgtgtaccccaaattaagtgtttctgattggcaagtgtctctcatgtaaataatgattaagaaaccatggcttcttccatcttgtgactctaccatcttcaacacatggtgaggggctacagaggggaagagaaatagggggttgtactcacaaaatttttatgtggcaggcctgaaagtggcacatacacagacccatacacatttccttaacttataatcaatgagcatgtaatgtaacactcactgacatctctatagctacctgtaagggagtctggagatgtggtctcactgcatgccaagaaagaaacattctttcctgcaatgcctatatatgtatatgtataaatatatatatgtatatacatgtttacatatgtatgtatatatatatgtgtgtatacatatactgtatgtgtgtatatgtatatatacacacacacacacatcttaaggggattttcttatagaaattttatttctcccccctctctatatatatatgaaataaatatcagagactgtgagattattaagaaccacagaaatttatttaaccctagtaatgtgcatgcctgtgttttaaaggccattaagtagtttattgtctacttttgaaagaaaaaaaattaaacaaagaaattaattaaatatcttggataaaaactgaaacaaacaaaaaggaaaataataataataaatttaacattcatccattgtaagtgtcaattattatggaattgcttactttaggcatgtatttcagaaagaattttatgcagtaaaaagcataacattaaagttatttgtctgtcaattattccatataagttggctaatttttgaatataattttattttactacaaggtagcaggttcatattacagttatttcaatatgtgagcatttcttttattttgatattgcatatcttgaagccgaatatatttctaagtcccatcaatagcaaggtgaatgttgtatcattttattattatgacttttattatacttttaaaattgaaaaacaagacatctttattatagggaatacagaagctcataattaataaagatactaaaacaaaattattaccaatattgcacaggagagccattttagagaattaggatacatccttaaacaattgttttatgaatataatatgtgacttttttgttttgttttgatattattgttttataaaaatgggagcactctataatctgttcttcccactcaacattgtgtcattaacatgattacgtattcttctacattattttaacagcctcatagtatttcatcatatgatgtatcaacatttactaagccaatccttcagtacagcaattagattacatccagttatttgctattataaatgagctgcagtgaacatctttgtgcctggatatttgccaaacagttttattaaactatgtctaaaatgtcaaaaccattagttctcaaactttaatatgcactggaatgatactggtgacttattcagactcataagccctactcatagagattgtgtttaggaagatctggaataagacccgggagtctgaattttagcaagcaccatctatgattctaatgcagagggtttgaatgtcacattttgagaaataatgacttggagacattagaaatactatcttttttccatcttctccctgccataatgccattttctaacaataacataagatacttattgctctggtgattagttttacatctctctccaaaataaaggcatttaacctcttaccttctacctgataaggttgttctttttatttctgaaccataactgatacacattgatctagagtgtgaaaaaagcctcttatactgttttggaatggaaaatgttagaatatagccctctagtgctttatcatttttattgtaaagataaaagtatttatagaaagtgggtttaaactaacagagtataagcatgagtgtaaacttcatttttagtagagataattatctcaaaaaagttacgtcttgaggcagttttatctaaaaaagaatgtcaaaaacattaagtcattcaacagataacctcagttatataaagcatttttgcaattgcaatgctaacacccagagtaggcagctaaatgcttataaaaagatgttaactttggccagctatatttagtgctactgaagctttgctagactcatcctttgttcttcttttctatgttcatccagaagaagagtatttacacatgtattagtcagggttctctagagggacagaactaataggatacatgtatatgtgaaagggagtttgttaaggagtattgactcacacgatcacaaggtgaagtcccacaataggcggtctgtaagctgaggagcaaggaagccaattcgagtcccaaaacttcaaaagtaagtaaagtggcagtgcaaggatccaaaaacccatcactctgtagaagcatgttgtaacatttgatgattctataattctcatcacactcaaaagtaggaaagctgttttcagtctgtggctcaaggcccaagagtccctggaaaaccacttgtgtaggtccaagagtccacctgtttaagaacaggagtctgatgatcgagagcaggaaacatccagcacagaagaaagatgcaggccagaagactccggcattccagtccttccatgtttctctgcctgcttttaacccagctgtgcttgcagctgattagatggtgcctacccacatggagggtgggtctgactctccctgtacactgactgaaatgttaatcttctttggtaacaccctcacagacacacccaggaacaatactttgtatccttcaatccaatcaagttgacactcagtattaaccatcacaacacataagtcattaacttaatcatgacctgtttccaatccaggaatgaagttctgttcttagaggaacttcctaagtacataagtacacagaggctcactttcccaatctaaaagctaagactgttccaagtgcatatgctttctgtttttttctatatttgttatctcacagaaacattgatttgccattggttcttgcaaaatcagtattttataactggaggtggtgttaaggtttattttgtataaccttttgattttatccctatggagactaaagaccagcaaggttaagaccagcagatctggaacaggttattatagaaatttgtatattatgttgttgctagcaaatggaattattgcaaggagatgatggaaaagatagtatttctgatatctccaagccattgtttttcaaaatgtgttgttcaaaccctccgcattgggatcagaggtggtgcatactaaaattcagactcccaggtcctattccagatctgctggtcttagccttgcttgtctttagtctctgcagacaaaaaatcaagacattatacaaaataaaccttaagaccccttccagttatgaagtactctgattttgtaacaaccaatggcacctcttaagaccacctgagtaattactggcagagcaggggataaaatttctatcctctcatttaatgacagattgtcattcatttctaatgtttatgtagggctgctctcatctcagttctgtttaatttttcaaatgaaaatgtgaagcttattgagttatgatcaattagtgtgtgttctgttattttctactaatactcactctgccagtgactatacttgttaaggtagtgcagcatggtggcttttagctccagttttaactagaagagatttgggtttggatcctgacatgtagggtgatcaatcatcctggtttccttgggactgtggggtttccctggacataggactttgagtgctaaaatcaaaaggtcccaggcgaagtaagatgattaatcaccccactagccatgtggctctgtcatgataggtctctgggttttttaatgggtaaaattggaaaagcaagaagaagtaactcataggattttagtaaaaattaaatgagacagtatatgtaaaacacggcactacttaataaagactcagtaagtattagtcattattattgatgttttataaagcaagtagattcctcaaagcacagattctcagaatttaggatttgaaataaatgaactttctttttagctttgacctctttttttttgtttgttttttaaatcttctcagtacccttctgtcgtcttgtctatacaactggacaatacaacccaaggttggatagagtccaccatctcacatccttttaccttttttcaagatataaatcaggaagacaaaaattttctatttgggaatcaatgtgaagagtgagcatcaaagacagcatagagctatggagaaaggggaaattagcctggattataataacagctgccattttgttgagtgcaaactctttgccagatattggtgcttcaaatactttatatatttggtccacacaatgactccgagaggtaaatattattatctcagtcttcagatggagaaacaacctcaatgagcctaagtgacttgcccaaagatagttgtatagtaaggagtgtaataaatgaggtctggatgttccaagctcgatgaatgtccaactttcagccagctggttaattttgagaaatataaacttcttcacctgtaaaactcagaagggaaggaaattgccatatatgagtgctaatcccaatgcaagtaatgaactatgcacatcatatgcatgatctcatttaattcttgtatgtaaatattagtcccatttttataataaagaaacagaagccttagagagactaagcaacacactatcaatacaaatagtaaagtggcagtgcaaagattcaaaaacccaacactctatagaagcatgttataacatttggtgattctataattctcagtatgtggatataataaatattgctagagtagactttccagccatttggaaataattattgctcatgtgatagtatatttttctcaactagaatcaaaatattaacttttgacctgggtttacctttgcatgtggataacatggatcaaatttgcaaaattctgctgagctgtgacttaaatacagttctactgggtcctcaagtttcttttaaagtcttttttttcttactaccctctcagtcttataaaaattggcaagagtatatctgagtaaatgtgacatatgaaaacatatgtttcaaatatggccttaaatatgcagaaaaaataggacttttcttcctctctcttcatgggcatgcatgtaagaaagatatatataaatatacagtcatgtgctatataacattttagtcaactatggaccatacataccatggtggccataagattataatactgtatttttactgtatctttcctatgtttagatatacttagatacacaaatatttcccattgtgttataattgcctacagtatttattacagtaacaatgtaccatctaggtttgtttaaatacactgtgatgttcacacaaggaaatttcctaatgatgcatttctcagaatggatcattatcaagtgatgcataactgtatgtgtgtgtgtgtatatatatatatatatatatatatatatgacacatgcatatgtcaatgtatatatttaatgatgtttgcaattcatttcatagaagttataaaaacattttgatttatccttgattttatagaattcacacacaaagctaataaattctaagattactgaagatgttagttaactgttttaaccaagccacacctggtgaacaaatttgctattttaaaaataaatttagattttagttaatcaaatattgttcagttaatgtcactgttttctagatagcatttttcatgtatacattttacttaatttctttcccaggaaagtattaagccattatgtaatgataaacagtgtgatttttgttgattatatgtactttcttgaattattacctcaggcctctgaggaaacactacattccagtaatgaagaggaagaccctttccgcggaatggaaccctatcttgtccggagactttcatgtcgcaatattcagcttccccctctcgccttcagacagttggaacaagctgacttgaaaagtgaatcagagaacattcaacgaccaaccagcctccccctgaagattctgccgctgattgctatcacttctgcagaatccagtgggtgagtgccctcagatgtcatttccccattttatattttagatggtgattgttgtctgtggtcttttgagtttttgtggctcattgcttgatttgagtgggagaacaatggggtttctagagtcaaaaaaaaaaggatgaatttctcaggtgacatttctatatctgcaggagaagacattttagtgaaattgttttacatggaagagctgaaaatgtattggtgaatgctaataaacatttgccaaagggcagttgtacttggaaaattaatattggccatatgtgacttgatagaagacattttaacaaatgagaactaatggacaaattaccatgtagtgatacatgtctagaaacaataggaaatgttcactgatgcaaaatgaatttggaatcaagaataaattgtattgtaattagaatcaaaagaaatatgcaatggtattcatgagtctaaaaattttgcctttgacattttgaggtattgcttaccagaatactatttcagctcccagtataaggtgattttatttagcattagtacttatagaggagtcagccacagccacgtctccatcatgtaacatttttatttcctactttgcagggtataatttttgtttttattctttttcgtgttgtttaccaatggagttttacactttaaagcaatgtcaccagtttaaaaattgtgaaagaaagtaaggatattgggcacatcaattatttgttcttgtgaccagctgcatttttaagaagcctggatagaaaggaaagaggatgaagccagtgggccatacatagatagactcttgaacatttgctaaaactacaagaacaaaacaattactatgctacaaatgtgatggtcccacattctctgccaagttaaaggcatctctggggaaaatgtcttttggatcttgttaaagttaggaaggttgtgctcagaggaaatttggctagtaactcaactcaaagatactgaatttagctgttttacttgttattgaccagtctaagggacctgtgttagaaaaaggtatgaggaaaatactactagataaataataagaaaacaaatattcaccttgaagcaatgaaaagaggaaatatattttgtttctgttgttgtaattgaactatgtgtttaaagaagaatgcacacacattgatcagactcatactaaagcagatgggaattttatatgacagcttgacctgaacattttttgaaaaatgctgttcccctgaaactatttctcctttctttggaaataacattgctgccgttcattctgtgtagaagagattcacagatatcaggtgtatccagggatcccaagatcaccctcgggttcaatgatttgctagcagagctctcataattcagcaaatagtcatattcatggctctgatgtgttatagcaaaaggattcaatgcaaaataagcaaagggaaaggtagatggaacaaaatctggaggaaaccaaacataagcttccaagagtccccaagtgaagtaagacaagatacacttaattcctccagtaatgagttgagacaacacttgtgaaatgtgttcaccagggatgcctttaccagggaagcctattaaagactcagtacctagagtttttactggaggccagtcacttaggtaccctctgcctaggatatacaaacttccagatttccagaaggaaagtggatatgcagcataaaccacattatttgcacagacagtttaggcaaattgagccagtcttaccatttagagaatggtggatcactcctgaaagtcaggtctgctaaaggccaatgtttcaaacaggtcttcctatatttaattgacacagtcctgattaactgtttactacacaccaggttatcttagaatagttatcttactttcttcacacttgtggaagaagagattataattaaaattaaaatgcactaatttaaagccctgatatattcaattagctttggtatctcaaaaattttggttgctaaccatgatttctcattttgagttggtgttatatcatgtgcccttaaaataaaatgatgcaatatacctaatatatctctatgtagttggatattgtgtgtaatctaaaatcttgagctgggcgcagtggctcatgcctgtaatcccagcactttgggaggccgaggcagggattgattgacctcatgaatttgaggcaagcctgggcaacatggcaagaccttgtctctatcaaaaacacaaataaataactgggtgtagtggcatgcgcctgtggtcccagctactcagcaggctgatgcaggaggatcgcttcagcctgcttgaaggcagaggttgcagtgagtcaagatcctgccactgcaccctggcctgggtgtcagagagagaatgtattgctaaaaacagtttccaagtgccaaggaacttcagggttccgaattgtctatgtcccagcatttctgttgattcacattcatttccatcttcattaagatttaagaatcaagtacaattgacccttgaacaatacaggtttgaactgcacaggttcctttatatgaggattcttttcaaccaaacacaaatggaaaatatagtattcctgggatgtgaaactcatgtatacagatgggctgacttttcatatatgtgggttccacagggccaattgcaagaattgagtatgcatgaattttggtacatgtggtagacccgaaaccaatcccctacatataccaaggaatgactatgtaagcaatgtcatgcttactatttacaaatttatccaatattatgaagaaaataatttttctttttgaaagatggaacaagggtttcatttcaaaagaaacaatagacaataatggccaatcaacaagaaccaaactaagtagatattaaaggtattgttattacatttggaagccagaacaatttgcgaattgaatattgaggactagaaaattcaggagtataactttctggaatgtcgaagctttggaggagaagtagaaggtaaagtgcggggccaggtgcagtggctcacgcctgtaatcccagcactttgggaggctgaggcgggcagatcacaaggtgaggagatcaagaccatcctggctaacacggtgaaacccagtctgtacgaaaaatacaaaaaaaaattagccgggcttggcagtgtgtgcctgcagtcccagctactcaggaggctgaggcaagaggatggcgtgaacccgggaggcagaggttgcagtgagccgagattacgccactgcactccagcctgggcgacagagtgagactctgtctcaaaataaaaaacaaaaaacaaaaaacaaaaaacgaaaggtgaagttcgggcttatattctgtagccattttagttaaccaggagccccagattcctttacagctgtcagaaagagctaatgggaaatttagcctattttaactgagttgtctccagcccattgcctcattattaaaggttagtatgcctttaagtcccattgccaacctatactgagaccataccttagcaattgcaaatctttgatggtcaaggcgacttttcatgccctccagatttattttcctttctttcttaacatcatagccttttgctctttcttctggcatatcagtatgccagatactttctttgtcaagtgtcaggcagtgggtctagagacttgtaccacccctttagaaagccacagtatggccctgagaatcattagtttctgaaaaagaactttgatgtgcagaaataagtgtcgtagatgacagctattagcttcctcatgaagtacttgggtcaagagactgagttcaaaaggacttttagttattcacacttccatatttctactttgactttttttcccaagcaatgcgaatgtgttcaaatgtacactttttaacaatttcttttgagtatgcccaaactgttaggttgtgtgtatgctgtgatttagcaaacttaagaaactgtaaatgaacagaaaacagaattattaagacctgggatgcctataaccctgaattcatctgccagttaactttctgtacagggtaggcgaattcaggcttcatggctgtttactgaccttcctcgaagtaagagagacagctattaatgacttgaaatgttatgaacgtggcatagaagtaatttggaaagtcagtttttcatattttcctcctaaataattttctattacctttcataaaatctttttattaaggtataatttacatgcattatacatcttgaattaatatgtatttatactgtcatgtaatcaccatcctatttctcaactgatcactaaaggttattttgcctcctcttggacttcacataaatggaattgtactgtatgtacttgttgtgtctggcttctattagtcaaaatttttttttgatatccatgtttgtgtatatctcagcagcttgtttttattgcataaatatagcataatgtatttatttttactctcttactaatgaacctttgggttgtttctagtttgaggggattatgaatgaagctgctatgtacacttataccagtctttttgtgaatatatgcactcatttcttttgggtatattcccaggagtagcatttctgagtcataaggaggcaaatatttattttcattactgcccaacagttttctaaagtgttgtactcttttaccctcccaccagcaatacgtagtaggtacagttgttctacattctcaccaacacttagtattttcagtctttttcattttggtcattctggtgaatgtgtagtggtatactactgtggttttaatttacatttccccgatgagtaggaatattgcttaccttttgatgtgtttattgaacatttggatatcttctttgtgttatgaccattcagacatttgttcagtttttattttacttattgatttctgagggctctttgtatattctagacatgagtattttgttagacatgtgtattataaagtgaatattttgttctaaacagtgtcttgaatttttactttatgtttactttgaatatgttggtaatcctagggacctgtgaaatatgagggaagtgtgcagcagggagaggaaactgtaaggcaagaagtggacccaccttaataaggggaaaacaagaatgacatttaacctgcagagcaatttcacttggagacaaggacagctggtcccttgaatattggatggtggcaaataagacatccaagcactaagagggcaggcagagaagagttgagaatgaagcaacagcatgcttatggtggctgatggccgggtagtgagtagacaagagtggggctctggacatagatggtctgaatttgagtcctgtctcccacctactaccatcttgtgaaggtacttaaccactccaagttcctaattttaaaaaagcaaaagtaggaataatgcgagcacctacttcatgggtttgttctaatggtatactacctatccccatttttcacatattgtgaatacttaatatataacatcaaaaactgcaactcctatgctgggaaaatattagaacaaataatgtttgttgttgttaatatttgtttacttattggaattggcttcagagatactctacaaataactcttggggtagagatggatgttctagcagatttgggagtcaatcagaaattggctcctgtttcagaaagttacagttattatggacttgtgacatttctgttcagaagtctgtatctggcatcttcccgcacacatgtcttgctttcaagtgctgttcagttatgtttggaatgagaatggtggtctccctacttctgcttcacttcttccacaaccttgctgacttctaaatagtttcctgcttagaatccttaggaggaattaggatctcctttcagccctatcttgggcactgacttacattcccacatgtggtccatgtgcccctagacaatctaaggagagtctagcttgccacacatgtggaaatcattcccagttcacaggtgggaagttatgggaatgaagaaaatgtgggggaggtagcaataaaactctctacttacatttcattgctgcatctgctataataaaatgagagccaagagcaacttattcccttgtgacatgatgacacacctctggatagatgtatattcagggatatgggtgggtggagaatgttacaaacactttctcatccctagtatcctattacctgtctgaagaagtacactgtgtaccttcgtatcactatgtcctataaaaaaagaaaatgaaaagaatgtaaaagaagacatggtcacttttggggataaatttaactacccaacagagagagaagaattactttattcatataagggttcattttacaaggatcttccagaaatatttccttgatttgtgtgctattcacagagggactggtcacagatgccagttagacattggattctttgactaaccactcttcatcttgtgctcttgagtacaaacagtacgttagagagaacattaaaaaaaagattgttttcagcaatttattcctgaatcaaaatccaaacagaaaataaaaaaggaaaaacagaaggctggatcagacacatctgatctttcaaatttggccttttaaacttaagaaggtattaatgggcatttcatattttaaataatttggatataagggtgtttataaagctagagattgtatttcacagtctaccatgaagcctgtaccttcatgtttgatgtatgttcaagctttaagtgatttatctaagttcttattgaatgttatatggaagatctataacccactaggcaaagcttcccaaaattgaaaataaaacacataatcatgattgtgaaacattctgtagaaatatagtattcttgagctagatgaaattttaaaagtaatcaatgccaaaaattgggaaacaatacttccaataatcttgaagatgcatactaagcagacaaaattggattcttttggttttgattgatttacatgcaatttatgattgtagtgtttatctaaacttctcaggatactcacaaaatatcacaagccttttattttaaagcattgttctgatttaatcttatctgtctttgccttaaactttgtaaatttgtgattatttttgttttgttttgttttgttttgtttttgaaacggagtcttgctgtgtcacccaggctggagtgaaatggcgtgatctcggctcactgcaacctccgccccccaggttcaagcgattctcctgcctcagcctcccaagtagctgagacgacaggcatgtcccaccacaccaggctaatttttgtatttttagtagaaatggggttttgccatgttggccaggctgttctcaaactcctggccttatgaaatcttcctgcctcagcctcccaaagtgctgggactacaggcgtgagccatcatgcctggccccaaatttgtgattttcaagattaaaattagattctaagagtgatggagcactttaaaatatctggataaaaatcatcttatttccagaatcagggcaattcttgaatctaatctaaaataagcaatgtaaaaatgctgacttttttctcacctatcatagactctctaaaaggtttatgctatatctgccatgccttcaatttacaaaataatatgatcatgattaaactccagtgtctttttcaggttatcacagtaccttttcattattgtagtacattctggtgtccccattaaggatatgctgaatggactgatactataccacagtattttactttatatctgtgtgtcagtaaagcagcatgtaccaggggaaggtttacctttagaaatcaaaggcttctatttcaccaggctcccacgttgttaaaaacactaaagagggtgacaacttctgcgttcaccaacatcagagcatctagtccctattttcaaaactttcttgtgccaatatgacttgttttagtaatagagattggttggggaatcccatattttttaaggcaaacccaaggaagcatttattttaccgtgaaaagtgctagggcacaatactatattaagcacaaggcagaactcaacaaagccctttcctttgattatttccatcactcaataataattgttccactccatagatagtttctttgcaacaaacactgccctggctgaccatccttctgtaatgcagaactgtgaatcactgaagtgtttaaggagagcttataattctttaaaagcctttttattctgttttacagtatttgtgtttatgaaaaaaatgcaggtaaaaatattctgaccaaattgtatttgtttaattattatgtattgcataatgtataatactgattcaaacttaacatgaccagagtgcattgcttggagaaatccaaaatgaaaaatatattttcagttgaaattcattaaaggatgaagtaatcaaactttttttctctacaaatgagcactacaaaatggcaaaagttttcttttaaaaaatctgtatatagaaaaaaactatagaaaaaatatatcacttcttgggttaaacacacttccccccaaccaaaaaaaaattctaggtacttagaattctttctagaacttagaatttccatattatttttcatcccatttctctcattcatttagaatctgccctccagttgaaaggaagtagatggagccgggcacttttagattatttcaaatctgaggaattcaacaaaaataaatgctatttagttatgttgtttgaagtcatgtatgcaacatatctggatgatgggtcaactttgtttaatagattagcatcatttacactgaagttcgtggctctgagcttcgttaaagtgagacctttgtccacattcccaggagggctttttctcagggggttctgaattttaccatgacgtaattcctaaacagttgtgattagtgctaaatgttatcataaacacacacacacacacacacaccccttgctgtgtgaaagctagatatagatattaaaaactttagaatacttgttttttaaatatgtaatttataatatataaataatatttagaatataaagtttataatacataaatactatacttctttaccattcactttctagaactttcccagcttttgatcacatatttcaagggtggtctccctctttactcctctactaactcttctgtgtctcagttaacatgtgattttggctttcttatttctccaacattatttaattcagactaactttatttcttgaaggtatataccagacatacctcggagatattgtgggttcagatccaggccactgcaataaagcaaatatcacaataaagcaagtcacacatactttttggctttccagtgcatataaaacttatgtttacactatattgtagtgtgtaatagcattgtctctaagaaaacaatgtacatgccttaagtaagaaatacttaattgctaaaaaaaaaaatgctaacaaccattagagccttcagcaagtcagaaacattttgctggtggagagtcttgcctcaatgttcatgactgctgactgatcaaggtggtggttgctgaagattggggtggctgtgacaatttcttagaataacactacagtgaaaattgccacatccattgattcctcctttcatgaacaatttctctgtagcatgcaatggtgtttgacagcattttacccatagtagaacttctttcaaaattggagtcaatcctcttaaacgctgctgctggtttatctactaagtttatataatattttaaatcctttgttgccatttcaacaatgttcacagcatctttaccagaagtagattctgtctcaagaaaccattttctttgcttcatccaagaaacaactcctcattctttcaagttttatcataagattgcagtaatttcattacaacttcaggttccatttctaattctagttctcttgcaatttccagcacatctgcagttactttctccacttgaacccctcagagtcatccatgagggttggaatcaatttcttccaaactcttgttaatgttgatattttgacctatgcctatggatcacaaatattcttaatggcatctagaatggtgaatcctgtccagaaagttttcgacttactttgccctgatccatcagagaaataagtgtctatcatagcgatagccctatgaaatgtatttcttaaataataaggcttaaaagttgaaatgactccttggaacatgggcttcagaatgaatgttgtggtagcaggcatgataacattaacctccttgtgcatctccagcaaagctcttgagtgactaggtgcattgtcaatgaacagtcatattttgaaaagaatctttttttctgagcagtatgtctcaacagtgggctcaaaatatttagtaaaccatgctgtaaacagatacactgtcatccagtccttatttttttatttataaagcacaggcaaagtagatttagcacaattctcaaaggccctagaattattggaatattaaatgaacattgtcttcaacttaaagttaccatctgcattagctcctaccaggagagtcagattttcctttgaagctttgaagccaggcattgacttttcctctctagctatgaaagttgtagatggtatcttctcccaatagaaggctattttgtctccactgaaaatctgttgtttagtgtagtgccttcatcattgatcttagttagactttctggataacttgtcacagtttatacatcagcacttgctgcttcacttcacactcctttttttttccagcttttattttaggttcagagggtatttatgcagctttgttaaatgggtagcttgtgcaccctgtacttttatgtattggagatggcttcttttctttaaacatcatgaaccaccctctgctggcatccaacttttcgtctgcagtccttaactctctcagacttcattgaattaaagagagttagggccttgtttgggattaggctttggcttaagggaatgttgcggctggtttgatcttctatccagaccactgaagttttctccacattatcaataaggctgtttggctttcttgtcatttctgtgttcaccagagtagtacttttaatttccttcaaaagctttttctttgtattcacaacttggctaactggtacaaaaggcctggctttcagcctgtcttggcttttgacatgtcttcctcactaagccttattatgtctagcttttgacttaatgcgagagacctgtaactcttcctttcacttgaacacttataggccattgtaaggttattaattggcctaatttcaatattattgtgtgtcagggaatagggagacctgaggaaaagagagaaattggggaatggccagtcagtgaagcagtgagaatacatgcaacattaatccattaagtttactgtcttacatgggcatggtttgtggcaccccaaaaattaaaatagtaacatccaagaccactgatcacagatcaccctagcagatataataataatgaaaaagttcataatattctgagaataccaaaatatgacatagaaacacaaagtgagtacatgttattggaaaaaatggtgccaatagacttgcttgatgcagcattgccacaatattcaattggtaaaagcacaatattgtgaagtgtgataaagcaatgtgttagtctgttttgcatggctataaaggaatacgtgtgactggctaatttacaaagaaaagagatttatttggctcattgtttagcagggtgtctgggcaaggcaccagcatctgcttggcttttgtgaggcttcaggaagcttttattcatggcagaaggtgaagggggagcagctttgtcagatgacaagagagggaataagagagggggcaggtgccatattctttaaacaattagatctcacaataactcatgaccacagggagggcaccaagccatttatgagggctctgaccccatgacccaagcatctcccactaggcccaccatcaacattgggaatcaaatctcaacatgagatttggagggtataaatacccaaaccatatcaagcaaagcacaataaaacaagtatgcctgtatttatacacatattacaaaacagaattaaaaacaataaaatcatacatgcaagggattctggtaaatatactgatcccctcaatcatgcattagtcatatattaatgtattcactttatattcaaccaacaaatagtgagagtctgatatttgctgtatactgaggtatgcactggcgacccaaggctcaacaagacaaaacacagccttttctttcacaggggattgaatcaagtagggcacgtgcaagaaaatagaccactataatcttgtttgtttcatataatgtacaaatatgactgcagacaaatggagaaatatgaaatctcactggggagcaaactcactttggcttgtgaggaactaacacctaacctgagaccaaaataagatggttccaggaagagagaacagcaggtcaaagtccagggatgagattaaagtagagtgtctgcacttagctaaataaaaactgctaaaacatggctagaccagaatgccaattgaaggtacagttgataaaacttaccattaacttttcatgtaaccaatatgtgaggttttgtaatattttccagtatgctaagcagctatgatataaacactgaaaaggcaaacagttggattattccaaaattggaaagcaggtgcaatataagaaaaatagggcaagggatttgaaggtatttgaaagaaagtgatagaaatgatgaattgtggcaacttagctggttatggaaatgagtgaatataagaagatactgatatagaaagtattcaaggtctctagaaatctctatgatgtcaaacaggtgaattagaataactgagcaaacaaaagatagatcatatttggaggacagaatgaactttaagatgtaagtgctagaggtaatttaaggtatgttcaagacatagaagggtgtcagggaagagggtgactgccttggaaaagatgtagctgaggaactgagagatcggggcatgaggtgatgcctccacatcaacatcaaagtcacccaggactgcagcaggattcaagctgtcaagatgacaaaaaggtgggcagttttcagtgaatgagaaactgaccaaagggactggcagaagtcagagacaaggaagtagagttgattggcatagatgtcaaacgagaagtttttacaagaaggtggaggagtaagtaaaagtgagtaaccaggagagcacccatttcatcttgggacccagagagggcattgagaaccagagtaccttaccctgaatccaccacagggaagtgacatctttagcgaagagtcaaatttgagagaggttaggatctgggatgactttttggtggcaaggctgaggatgaagtgaagtctgtttgccatgggaaaagggatccagagaaactgattgaataatatggaaagaatgagaatgggaggatagacaggggagagaaatcacagtgcaacatggggataagaagttgaaagaacacagggagaggaagaagctctgtatcaggtggttgtctgagatatgattatgaaacagcattccaaaatattttcaataattggtccacctgtcctctgactgatgggtgttaaaccagggaacaagaagttgagcatagctagtaggtcttttggaaagaccataacgtttgtcctagtcccagtaagtaggtctgcaatggtgtccttgggttcctagtacatttcagcatctattggagaataggagcttctggtgtttcagtacttctgcatcttccagattactcagctgtttcccagatttattacagtctctggagtatggagaaggatctgattttttaaaaaatatgaattatcattttcaaagtattagtttattttaaataatttttatatctaactctaatattttgccagcaataataacatcttaggtattttgaattagcatttgagtttgcttttgagaattttagttcttagaaataataattgaattaaacactattgctttcttatatattcttaaatactatttctggcattcaagcattattccagttcgtcatgctgccaattttagcaataaaataaagaataaaattgaattcaatgtggaaaaattctatttgtagaaaacattcgtctgtaaacggggttactgttgtgaccttagtgaaacaacagaaaggcacgtgcatacggttttgcccttagcttggatgtaacatattatttgcagactttaagtcatagcaacctatgatcatgctaatttttatttaaggctatttgatagagttgtatgattgagacctggaaccaagatccttgatgtaatacatatgtgcacacaatttttttattctcttctctttggtgaccttgtctgggtcatttttttgtttgtttgtttaatttacactgtttgaaacagtatctgtgactagaatttggcaactgtagagtatatcatatgtacacagtgccttagcaaagggttttaattaaactcagtggaggagacccaagcagaggagccttcatttgtcttaagaagaaatgtcaaggttaattgattttcagaggattatctgcaacaaataaagaccaagactcatatcttcttattttggcttataaattctggtatgttctgttcaatatccactgaaaaaaactgagatgagagtgtttctataaaactctatatgtcaaagcatcctttgcagttggcaaaactgaatgaatgacagtgaaaatgtatacttatggattatgatatagtcattaaaatgattattatgataagtatatggtaacatggaagtatttagaatgttttgaggagaaaagcaaaatatacaagtatatccaggttaaagttaaaacactgcaaaatatatgcctgcatgtggctgagaactggaaaacaatgtgaaaataatttgaattttttgatttacaaaattgtggttttttatttttctcacattgatttctattaatgaaaataagtgtttatccaatcaataaaattacattaaaatttattatttatttacaatttcattcatacaaattcatctattgtgtcttagtatatgacagacacagtttgaggtactgggaatattttatatgtagattttaaaaattcatgaacttttgtttttcacaggcaatccaataggaagttttggcaactatggtgggaggtagggatacttgggcctttcagaattctccagatcactttgtataaccattcctctgttggtgaccgactccccaaaaaagatcaccagcagaaccaagtgaaactaagtattcatctcagtgaaataagggaggacatcacctttaaaattagtagtattttggaaaggggaagtaaagggaagatatttgtagagttttatagccaggtctgggagcctgatcttgcaaggtggaaaaatggctggcattaggcagaatttagagcctagcagttctggattagtggggtctctaagagcagtgaggttctcaaagtgaaccttgataagtgaactgttagtcttattgaataagctggttcaggccatttacagccttattttccaaaagcaaacatttcctggagcaagtacctaagttatttttgcttggtctccatgtgctcagcattaaaacaggcatttaaactttgactccaaattgtttagcactgggacagaaaagtattttggtttcagtttttaccttctttgtgagcgacctaggtttgatcaactcatttggctgacaagccggatcctttgtcccttattttatttttttagacttatattattgtcacctatattgcttggaaatttaggaaacacagtccttgggatagctggggggatgagaagtcaagagaggtaaggtcttagggtagacaactgggtagatactgggctactcagtatccaatcctcttctgttttgggggagtttcagaataggtgagagaaaggacctagccttccactaggggagtaggaatatgcattccctctgcatgcccctctggcagacagagggagggtctataacctcaatgtagtcaatctgatgttcctagccaggactttgaatcttgaggggatggctcagaccatcacatatgccactatcgagtggaagggccagtggcatctgttgtagctgctgacagtgtggcgaagagcagtgtgtgcccagcaggtgaggaatagggtcccaggcagactgatccagcctcccagctgcttattatcttcactggattctgctcaagtctgcttcttcaagctccctgtttattctgagttctatcctatattcttttgatggattccttttcctgcttatgtcaatccatcatttctattgtttgcaaatcacagcccttgatcactctagaaactaaagtacagaaagtgccctgactttgctagaagtttaggtgtaaaattagtagtaaagttagtaaggaaaaaccaaaggggaagattgaattttattttaatgcattatttttttacataaaaagataacaaaaggagggtagtgaagagaagagtctcttgagatgtccgtggcaaagtttttaaagctctcaataaggagacaaggactgggcttcattgcaattattcccttttgactgttgaagctggtaggcttacaatggactcctaatgagagtggtttgcactacaattaattaagtgcatgacattataaactgcatgtctcttccctctggagaatattcttcctatataagtgctattttgttttaatttctctctctgtctcttcctctctgtttccctctctttgtctctctctcttttttatttatttatttattttttattattatactttaagttttagggtacatgtgtacattgtgcaggttagttacgtatgtatacatgtgccatgctggtgcgctgcacccactaactcgtcatctagcattaggtatatctcccaaagctatccctcccccctccccccaccccacaacagtccccagagtgtgatgttccccttcctgtgtccatgtgatctcattgttcaattcccacctataagtgagaatatgcggtgtttggttttttgttcttgcgatagtttactgagaatgatgatttccaatttcatccatgtccctacaaaggacatgacctcatcattttttatggccacatagtattccatggtgtatatgtgccacattttcttaatccagtctatcattgttggacatttgggttggttccaagtctttgctattgtgaatagtgccacaataaacatacgtgtgcatgtgtctttatagcagcatgatttatagtcctttgggtatatacccagtaatgggatggctgggtcaaatggtatttctagttctagatccctgaggaatcgccacactgacttccacaatggttgaactagtttacagtcccaccaacagtgtaaaagtgttcctatttctccacatcctctccagcacctgttgcttcctgactttttaatgatcaccattctaactggtgtgagatggtatctcattgtggttttgatttgcatttctctgatggccagtgatggtgagcattttttcatgtgttttttggctgcacaaatgtcttcttttgagaagtgtctgttcatgtccttcaccactttttgatggggttgtttgtttttttcttgtaaatttgtttaagttcattgtagattctggatattagccctttgtcagatgagtaggttgcgaaaattttctcccattttgtaggttgcctgttcactctgatgatagtttcttttgctgtacagaagctctttagtttaattagatcccatttgtcaattttggcttttgttgccattgcttttggtgttttagacatgaagtccttgcccatgcctgtgtcctgaatggtattgcctaggttttcttctagggtttttatggttttaggtctaacgtttaagtctttaatcaaaagttgtccctgaaggaaaattaactctgctgttagtccactgagaaagcttctcttttaatactggaacatatctttgtctaactctccctcacacctagtgctaaatttatcagcgttgttcctgatacaaacattttgaagacaatcgtgaggaaaaagatgaaaaaagttgcatttaacttttgttacaggtgtccttgttctccagaagttactgtctttgttgtagtgtgcatgcagtcacaggagtgtgcatacatgtgtgaagtacttgagaagtgtatttgtccgttctcacactgctataaagaactgccctagacggggtaatttacaaaagaaagaggtttaattgactcacagttcagcatggctggggaggcctcaggaaacttacaatcatggcagaaggggaagcaaacccttcttcacgtggtggcagcaaggagaactgcagagcaaagtggggaaaagcctctataaaaccatcagctctcatgagaactcactatcacgagaacagtatggaggtaactgtccccatggttcaattaccttctaccaggtctctcctgtgacacatggggattatgagaactacaattcaaaagatgagatatgggtggggacacagccaaaccatgtcaagaagtatttcagagacaagtcattccccaaaccttatcatcagggtcaagacctggcaggtgagacattagcaggtgaacacaacattctcagaaacccttgagagtactcctttccctccaggcatcttctttcaaccttaatatattctattcaattatattcacagctttttacctcaattataattccattcttccaaatttgttttcttctcccatctttcctcctaataaaatatctattcttcagatagtcttcctttgtaaaatagaaaggatctacaaaagccattctttgtgagatgtgaatcatttcaaataaattaatgccttgttctaatgtgaatggtggacttgtgaagagaagtgggtagatatttgaatttctgaatgctttagaatattagttgcacatgcagtaatatttcctgtagcttagaagaaattggttggcttaacagaaaatgcaattaaaatagtttacaaataggttctggcatcaataatagaaatattaaagaaactacatattatatcaagatgcttctctttttttcggggggggggtgccttttcttccttgatgaacacagtactctttcttctttgtcttttatcttccatctcaaattgtcaataataaatttgaagaatggagaataatacattatcacgtgccagaccttatgctaaacactggatatgttatattgtgtttcatactcaggatgatgctacggtaggtaccattattatcttattttacttataagaaaacagaagcctggagaagttaaacaatttcctcagtatcagaaagaaccaagatcaaatatctaggttaaggtattttatcttaacctagatatgccagaatatcaaatctaggtttcactattattttgtattctatccaaatttctaaaactgctaatgatggagggctgttatatggttctagctttatatatttttttatttcaacttttattttagatatatgggtatttgtacagatttgttacatgggattattgcatgatgcttaggtatggtatatcccattaccctgatagtgagcatagtacaagataggtaattttttaatgcatcccaccctccctctaccctctagtagtccatggtgtctattgttcccatatttatacatatgtccacgtgtgctgaatgcttagctctcacttataagtgagaatgtgcaatatttggttttccattcctgtgttaatttgcttaagaatatggcacccagtgggccgggcgcagtggctcacacctgtaatcccagcactttgggaggtcgagacaggtggatcacctgaggtcaggagttctaaaccagcctgaccaacatggagaaaccccgtctctactaaaactacaaaattagccaggcgtggtggcgcatgcctgtaatcccagctactcgggaggctaaagtaggagaattgcttgaacccaggaggtggaggttgtggtgagctgagatcgggtcattgcactccagcctgggcaataagagtgaaactcactctcaaaaaaaaaaaaaaaaaaaaaaaaargcatatggctcccagctccattcatgttgctgcaaaagacatgattttattctgttttggggttgcatagtattctatagtatatatgtaccacattttctttatgcaatctactattgatgggcacctgggttgattccacatctttgctattgtgaatagtgcagtgatgagcatatgagtgcatgtgtctttttagtagaattatttatttttgtggaagtatatacctggtaatgggattgctgggtcaaatggtaattctgttttaagttctttgagaaatctccagactgctttccaaaataactggactaatttacattcccaccaatggtgtataagcattcccttttcagcctcgccagtatctgtcattttttgacttttttataatagccatcctgactggtgtgagatggtatcttattgtggttttgatttgcatttctctgatgattagtgacgtaagcatttttcatatatttcttggccacttgtatgtcttctgttcatgaagccctttgcccactttttaatggggttatgtgttttttgcttattgatttgtttaagttccctgtagatagtgaaaattaggccattgtcatatgcatagtttgcaaatatattcttccattttgcaggtcttctgtttactctgttagtttctttgctgtgcagaagctatctagttggccatcttggcatctaatctttaattttctttctaaaatatttgaatgttttgcaatttctgactgaagttacttccctctttctgaagaaggccctgctgacatcaataattatctgagagtgacataagctgactccgattatgccaaagtaacccttacgtggtatgaaaagaaaatgaaggtgactatgattcctggggcatttgagattctgagaaaactccaggtcagctcgccataaaaattccccacacctgtagtttaatttaccaattaggaaattatatatttggggctaaatggtttctgatttgttggcctgaaagaaataatgtacttttaacaactataaaagttctctgctaggaatatcttaaatacagtgaaaatctgccttgacagtggacagtaagttagatttcattgttgtaaattggcaccattaactaaaacccttgtccattcaaaataatatgtattgtcacataacactaagctctgttattaaactgccacagattattgctttaacagtttgaaaatgatttttagaaaattgactttgtacaatgctatattagagtctgttaattgatgagaaaaccaaactcagatgacatttgcaaaaataaaattggcatcagttgaaacatctgtaccatttctcttatttaaaagacatttttcatctggaaaatgactacttcgattagcctcagatcacaaccacaaaataaagttgtctatgggtggcttcttatttgcatttaaattattatgttgcagcattttgtatgcacaagcaaatggaagattgttttgaatgacataggcctatacacctgagagagaaatatgtcatctacaaaatgtaaaaatataggtttttgtaaatgcctctgaaaggattataagaatctacattttcccctccctcctggagtttgtctttctattaaggctctagacgaagaaaagctctaatatactttccttggaggggtcatgagacaatgaagcataataggatttgaagtatattggatataaaattcatgtgatatcctcaagtagagagatgttattttactgttctttaatctttactgttggcgataattgcctttgtaaactaactttatgttgtaaactagtagcgaaccagagattgagttgagaggtgggggtaacagatgagatcctcacttgtgagggctccaagggcctgtgaggcaatggaaagggctgaccttgctacctggatgggaacaatgctgttatcattttcatgtgctcctgtttagaagatgagttaacatccataaaaacaagttagactaagggttgtcacactacagcctgtgggccaaatgctgcctgccacttgttttataaatgaaggtttcttggagcttgcactactactgcagagtagagtagtggagatggagaccattcggcctgcagagtcaacaatgtttaatatctggtgctttacagaaaaactttgccaagccttgatttagacttagtaactttagtaagaagttactgactgcacaaattaccaggatatttaagcttgtaaagtattaaaataccataactatctgcttcttgtggcagggagggggccaaggagaggtgaagtggttataatgctcgtgcattggttccttcattcaccagagtgattgtgcgccctctctgaaacagggataatgccaggtactcaagatacagcagtgagcaaaaagaggcatagtgccttccttaatggagatatgcattggagtcacatagcataataatgttgacaaatatccctgctctcatggatcaagaggttagagttttagggtaaccatggaagatctcactgagaatgtaactttgaataaaggattagaggacttgaggaagccaaccatgctgctagagtttctctgcagaggaaaggggagtgatgagatataggtgaaggacaatgtgagccaagattgttttttttaagttgaggaattaacagcatggttgtatgctgagggggacaattcagtggagagggaaaaattgatgttgcaggaaattgctgggataatgtctttgagcagataaaaagggattgatccagtgtacaacagaagggactagtcttggttttggatcaaggacagtttatccatagtaaaataagagaacgtagagtatatgggcacagatgcaggtcattgggtagtcgtggtggttgaaaattgtagaagttctttttttaaaactttaatttttcttagtatgtgcaaaggccttgaagcaaaatagagcatggtataatcaaagaattgagagaagaaaaacataatctaactgtaaattaagcaataccatggagccagatgaggctgacgaggtacacaggatacagacgtcagcaagactaagaatatggtaatgctaaaccaattaagaatggggttaaatcaaatttgcctttttaaaaaaagatgactgtggctactgatagagattggataggagagtgcaacaagagtttctgtggagagaccaatcaggaagctactgcagtaattcaggtgggaaatgaaggcwtcatggtctagagtagagggagtggggagaagagaaatgatcagattttgagagatatttagaggcagagtagatagacttacctcacttatgtttgggtatagaagacattgcctatgtaaagactgagtagagaagagagcctaggagtagatgtggacactcaggagaaggattgagatcctggtttagaacactgagtgaagaagctgggtattgttaaagaagagagccaaacttcacaactgcctagcagtgaagaagcagatcaacaaaaatcatatggtgcggaagggatacttgccattagattagtccagctgaagccaaacgctggttgcttctgatttttttaaatcctataaatatattggttaattttatttaaaaaaattgaacttttcattctcataatgagaccaaagtaaaggtcaaaatcttaagaagagaatgggtcagaacatagcaggcagattgttgtttgacatgatgtcaatggacacttcagttgtcatgttctaggcccattacattggcctttcctcttttgaagcttctctcatggaaccaagtgcattttatatctgcatctgttccaaatatgggtataacacagactctgtgagtagcctgcaatgtgtttcccttccacatattgctagataactctgcttataaaaatctgcttgcaaaaatcatagaacttgcagatcctgtcaaaagaattactattagatgaagttaagaaatgactgtagaagtaaaagaacaagagctggtcttaggagttccatcccttcatcagtctaggagggttgggatcttagaggcatttttgagctgaaaactcaaggcaggaaacaagccatcccactctgaatagggctgtgtttctcacctgaacagtgagaagagggtgttatattttctaataaaatcccacattaagttagacaaaaactctgtataactatggaatagactttactaatggaaagagtaatgtgaaaagctaaataggaaaattttaggcacgtattttcacaatagatcttgctgtacttgggggaggcttgtcttcttgattactaaggttaacttagtgcttcagaagccagcccgtttttatgttctgctgttttcctgattttggtgtgtcttgatgccactgtgttctagtaaaaattcccttcaatagactgccaggagagcagaccagggagtgtgagtgttttgtgcatgggcgagcacatacagatgttaggtgacagtggttattcagtcatgctttcagacctggagaacagttcaggtcaaaatctccaagtctgtggaatgaagctttgggggaattaatcaaaatgttactgaaagaaaagggaaatcaaatctgacttccacccctctgagatttttgttgaggacacagaatgagagcataaccttcaggtccagagtggaatatagagagatcttccactgacaatatgctatcaacaaaagcaaggtagagaggaaacgttgagcctcagcaacctgtaagtcaagaccctctccatcatccctagatgcttttgctctgtcattgggattgtgtccctttctataacactgtgacttctttggatctccacagcctgactgtgttcacgttctcctctccagtcttttagtttctcttacagagctggtgcatttctgtggggacagagcagctggaacctgggcccgaagctggttcagatatggaattccctttaagagcaaaaataacaattactaatataatacaagcccaatacaaagtgaatagttaaaaggagaaaagatatcactatgaattcaaattttaagttaacatatatcccaactaccacaaaatattataaatcataacattttattaactgcccaacccaattttataatacattttcccctatgcttggctaaatattctttgattgtctctttaaatgacactgaaattgtaatattttctatgtagagattgggaagatactttaaacttttcttcaggattgttgatttttaaaaaattattaatagttagaaaagttttgtaatgtcatatacattcttaacattgttatcaaattttgagaaatatttaaatttttttttcatgtaggagcgtaagatttcagggcattcgatgtggtgtgtgtgtttgtgggtgtgtatgttgactaatcttacatacttgtattcttttaccagtttgtcatcgaagtgtcactgcatttgtcatgagatttagatcctctctgtcaatgtcaacattttatatcaaatcagaaaaaaattaaaaattgtttcaatgtgtgttagtttgattaactccttttcattaatttacttgtcaagcaacccaagggccaattcatcatatctatttgaaatttatctctttctcttattgaattaccacttttgagatgatctggaaaaaaattgttacaatgtactgtctgatatctgaataatttctattgatttaaccacttggctttactgcattttcttcatactccaataattgtatttgaaattttcttattcatttatatttttagtcctttaatctaaaaaaattaaggataaaaaagcatccttcacgtatattgaaatcaggagtcagtaatttttcacttgtttaaacattcaaaacatctttctaactcacttcttgatattgggataattttaattttacttttgcaaattttgccaaagcatctggctaaataaacacacttgccagggcaccgccccagagcctcggcaggtacttatgcaagcagagagccctgcagctttggcttttatcatcttcaccataaacccatctctgattctcccctttccctacagcactttccactaacaatacacatacacacccatatcacacctatactatttatttttctttatgccccttttctgtagtatttatatccatagcaattatcaccatctaacacactacatattttgcttatttatttatttattgtttatctctccacactagaatttaagctttgtaaaggcagatgtgttcctttcctgaggctgccatataaatgaccacaaatgggtggctcgaaacagcagaaatttattctctctgagttgcagagagaattctgcatctcagaatacagttcaaaatcaaggtgctgtagggctggttccctctggaggctctgggggatgattgcttgcatgcctttcatagccgccagtggctgcttccaacccttggcactccttggcatggggcttcatgaggttcaatctctgcctgtgtcctctcgtggccttttttttttttttaatctgggtctctgtgtcttctctttttctgatcttaaacataatttcttgaggaaatcataaatcattggacttgtagctcaccctaatacatggtgatcttatctcaaaatctttaccttaattacatctgcaaagatcctttttacaagtaagtttacattcttattccgggtgaacttatcttttgtggaccacagttcaactcactacagaagttacaatttttctgttatgctcactgatgtgtctccagcacatagaccagagcctggaatgtagtaagtgctaaataaatatttgttgaaggaatgcattgagagcctatagtgccagatgctgaggtaggtacttagagcactgcaatttaaatattccctaactataatttatcttctcttttcaattcacatataaatatttttttaattttttaaattttttattttagattcaggtggtacatgtgcaggtttgttacatggatatattgcatgatgctgaggttcgagtttctattgatcttgtcactaagataatgaacatagtacccaattggaagtttttcagcccttgcctcctctctccctcccctctttttgagttccttgtgtcactgttcccatcgttatgtatgtgtgtatgcaaattttagcttccacttataagtgaaaacatgcaacatttggtttgctgtttctgcattcattcattcattcattcaatggcttatggctgcatccatgttgcttcaaaggatgtgattttgttttttcttgtggctgtgtagtattccacagtgtatatgtaccatattttctttatccaatccaccgttgatgggcacctaggttgcttccatgtctttgctattgtaaatagtgctgtgataaacatacatacaagtgcaggcatctctttggtaggatggtttattttcctttggtattatacccagtaatgggattgctgggtcaaaatggtaggtctaattttagttcttttggaaatctccaaactgttttccacagggtctgaactaattttcatttctgcaaacagtgtacaaccattcccttttctctaccgtctcgccaacatccgttatttttttacttttcaatatagtagccattctgactggtgtgagatggtatctccttgtggttttgatttgcatttctctgatgattagtgatattgagtatattttcatgtttattggttgcttgtatgtcttcttttgaaaagtgtctgttcatgaccttttcccacattttaatggggttatttggtttttttcttattgatttgtataagtttcttatggattctggatattaggcttttgttgaatgcatagtttgcaaatattttctcccattctgtaggttgtctgtttacttggttgatagtttcttttgctgttcagaagctcttcagtttaattagatcctaattttcaatttttgtttttgtatgcaattgcttttggggacttagtcataaaatctttgcctaggccagtgtccagaagagtattttctaggttttattctaggatttttatagtttgaggtctcccatttaagtctttaatccatcctgagttaagaggtaggggtccagtttcattcttctgcatgtggttagccagttttctcagcactgtttattgaataaggagtcccttcccccctgcttatttttgttgacattgtcaaagatcagatggctgtaggcgtgcagctttattttggggttctctattctgtttcattggtctatgtgtctatttttgtaccagtatcattctgttttggttactgtagttttgcagtataatttgaagtcaggtgatgcctctggctttgttctttttctttaggattgctttggctattctgctctatttttggctccattttacattttagaataggtttttctaattctgtgaaaaataacattgataacttcatagaaatactgttgaatctgtacattgctttgggcagtatggacattttagtgatattagtcattcaaagctatgagcatgaaatgtttttccatttgtttatgttgtctatcatgtgtcatttatttcagtagtgttttgtagttctccttgtagagatctttcaccttcttgatagtcctaggtatttgtgtgtgtgtgtgtgtgcacctgcgtgtgtgtgtgtctattgttaagtgagattgtgttcttgatgtaggtctcagtttgaatgtcactggtatatagaaatgctactgattttcgtacattcattttgtatcctgaaactttactgaagtcattatcaggtctaggagccttttggtggagacattaggtttgtctaggtaaaggatcacatcgtcagcaaagagaaataattttacttcctcttttcctatttgggtgccttcatttctttcttttgcctgatcgctctgactaggacttccgttactatgttgaataggaatggtaggaatgggcatccttgtcttgttcccattcttaaggggaatgtttccagcgtttgcctgttcagcatgatgttggcttggggtttttcatagatgactcttattattttgggatatattcctttgatgcctagtttgctgagggtttttatcatgaagggatgttggattttgtccaatgctttttctgtatctattaagatgataatatggtttttgtttataattctgcttatcaattcactataagttctttgaagatgaaaactctgtcttttatggtgtttgtacattttgaatttcttaatactgtgtatgtagctgacaacacataaatagatatgcaaatgagtaagagagtcatttgggatcactgctgatttaacttatcttgccatgaaagcattctgttcctctttcccatgcttggtaatatatccttttggaagaaacactcttgccaaaagagaatggcattattacatccaagggaaatattatttgcccaagagtgtaaaaatgtatgaaagaaatatgtaaataaaatcctatatgtaaaatctaataatatcaaagtttaatgatgaaatttgtcaagatgattataaaatatcacagttaaactgtatattatattcatgtttcttgccatttgtatgctaaaaacttataatgatttgaatgtacaaaatcaaaaatcgggagaaaagaagatagatcagagcctattaccaataatttatcctttacctccataaatgtttgctagaaatgccaaaggctctaatttgtctatttaaatgtacttcaaaaaagcattccccaagttgcctatttactctgttatctctataaatcaggaaactctccaggctttccactgtgaatgttgtatggaattgatagaacaatttcttttttatgttgtactcattcaccatttagttacttagacaataaacttagaatgacaaattctaagtctcaaaatatgaatgaaaattcactcattttcagaacaaaatttagcatcacactctcttgagcaaaatctcactagaaaaaaagatagagaaaatacgttatagcatttgaagtctgctacctcatgtccttttatctgctttctaatttattagaaataaatatgcaattaaaatatgactttccttaacctttacataattataattattatgaaaaatatgtgtaaaaatatacatgttatattccttttctctatactaccaacagccactcccattcatgtactcatattagaagggaagagctttgaatatcatatataacattttcagataaaagaacttaggtccagaaaagctaactcttttgctggtgactaaacatacacatacgtgcactgacacacacatattaagttactgagttgatagcaaaaaaaaaaagtgcaactttatatggaagtagaattatgtaaaaatgtctgtctaattctatactggaaaatatctcatatgaaatggctccttcatatgacaacactcagtattcaaaagcaaagcacaacaactaagaaagttactttccccaaccaaaaaaaataataataattaaaaaaagaaatgtacctattgtggactagctgattggataccatggccacagccctgattttcagtaaagacatagtttcaagaatgtcattcagatggtttcttaagtagggatgttgttatttttagcaaaagaagccttttgtccttgtcacatcaaaacacaaagaattccataagtcagtgccagtcttgtttttaatgcctaaatatctggccacatatatatttatgttatgtaaatgttattgccttgtttttcagaataagaatttagaacattagaaattgacttttataatgcaatttttttcaaactctttttggcttttctctaaatctcaaaatttgtttcaatttaggcaatggaattggactagtcagtctaatttatttttgttagccagtttcacctctcagattccagggaacaaagccaaactataagatatctactgaaaacatttgtaagaaataattaaaagcagactctgaataagcatataaaatgaagcatttttatcacaagctttataaattttttaaaaactgtgttcatttaattctgaaagcatgcctcttttgtaattatgaaatacagaaatatttgaaattccccagtcatcttggctcacaaatagaaacatttggttgcgtttggttcacaagcacacaggggcctgctgcttttggttctgtgtaaagcccatactatttcttgctttttttttccacaatgagtatgtgggtgctagaatgttatcgaaatattttgcaagacatgaatctaaaatgagcactctgctatggttgcagttacagtgcaaaccccatcaagttgctagcattggactgatagacaaggtaggggcagccagagagtctgagttcctgtgaggaactgcaagggggaaggggctgtgttcaggggctgtcctgcaggctgaaggttgttattagttgtgtggtttctgggcccacacaaaactccaccttctcccattagaagtcagtgtcctgttgatgtgaccacctgctttattattcggggttttctgccatctaagacctgggccactcacctggatttttgaactcttgcttttgcactgatacctgattcagaatccgatcaattgcctttccatctttgtctgtggggaccagaagtacagaggtcttataggtgagcttttattctttcttccagaaagagtatcctataactgtgtcagtgaggaagtgaaacacaacctcctgtttgaaacacaaaaggaatttagagaggagtaaaatacagggccgtttaattattccctttaataagaagcagcatccccaccaaagaacatgtcgatcttacttggtgatacatttccctatggagaagggagatctgattgaaagaagaccgaagggcaggagggagggagggttgtaaagcaaggatgtggctctgtgtaaccgggataaaagcaccctgccttagggagatgttgtgagaaataccccagcaccctcctgctacaagaggcaatccttatagctggctcttgccatggttaaaatgattgggacaaaaatattaaaaaagaaaatgctcctcgctatactggttggaatcctcaggcttggagtaggaggagctgagtaatccctgcagtgtcccgaaagctggaatcctgagtagattcaggccaatttgtgtgatattcccagggattccctccctattttgggcagaggaatggatttggatggggcagcatgttcctgtgagttggcaggcacccactgaacagaataactgatttggtacccagactgcagataccagctgaattgccaagcagatattgcctgagggaaatacctgctaaagttgaaatgatcactacttggatgggttaaacatttaccagtatcaactagtattatacatagtgttttagtttttctgaaaatgtgcatgcacatgagaagaataagtattaagatgaaactcccagtccctctccagaggcacaaccatggttaccaatttcttatataaagtatatatataaaagcttatataacctcttcttttacttattaaatacttgcattgattactttagaatgggcaagtaaaaactagtttaattgtaataattgtaatcactctaatacattttcttattcctgaatatttgctttgttttaaactttagcaattatgaaccttatactagtctaggaaaattaatctgtaaatatttctgttggaatctcagatttataattaaaaaattatatagggtatgttacataatttctgatcaaagatttagattaaacaaatatgtttgtgcacttattacatcgtcagcactgtcctgtgcctcactcaatacgtgaacttatttaatgtaagtccacttaatttcactgtagaaaccaaggagaaaaaggtctggggcacatacatggcattcttgtgaatctttctgaaagtgctctcttacctgacatggtagggatatcctgaaaggtaagaagggaaaccttcagggcagtgccatttgcagctaggtctttgagaataagaatgaattcttattcaatatgctggtgccacagttagggctaaagtatctttagacctgccatctctaataataacggccatttctgacttgttaatcttcccggcttttttccctacaattttaggtctaaatcttccatgtaaacacactctttcatgctgaatcctgctcaaataactgccaagatgtttgtttagtaatcctgaaatagaagattggcttctatgctaagataattattgggagaatctcttcttttaataaatacctggttcttctcaaacccatgccaagaagaattcttataatatcatttcttctcaaacccatgccaagaataattgtcaccatatcatttcttgctattcatcccttttaaaactaagaaacaggccaggtgtggtggctcatgcctgtaatcccagcattttgggagaccgaggccggtggatcacctgaggtcaggagttcaagaccagcctggccaacatggtgaaacccgtctctcctaaaatacaaaaattagccgggcatggtggcgcatgcctgtagtcccagctacttgggaggctgaggcaggagagttgtttgaacctgggaggcagaggttgcagtgagctgagatcgtgccatcgcactccagcctgggcaacaagagcaaaactctgtctcaaaaacaaaacaaaacaaaaaaactaggaaacattaaagcttccaaggaattgagcgttaagtggggtctaacatttaatatgactgtagagtaactcctctttactaagtctttttactagtttctccctttctctcaaatatgtacagtttaaattggatgggtaaagcaaatgggagagtattgctactttttagtcatatttatacaaatgaattatataatattaattgttcataatattccttgtaatttatagcactgtgagcagtataaataatttgataagcgctgggcctgcccagcctttgtaatgtcttgtcaagagtagattgagaactgtgacatgatgttaggaaatggagatttacaagcttactgaagaatataactgaggcattaggagtgcttttctgatcggattaatgttcagttttattttcaattttatcaagtgagtgttaatgagaaatttagttggctccagtaaaatcattatttttttcctatgaaacatatgaaacctaaaataatagtctaattgtttcatttttatggcttcgaaattctagacaaaaaaaaaattctagacaatgtaaatatttaaccagtaaatattttgatgcattaaatcgcaaaatatcttttataattgctgcatctctcttccaaataactagaacccaattcccattttcacttttctcacataaacatgaaaccatttcttatagtctgtaaacatttctacataagtggctagaacatatactgccttatgtttaattgcatgagacccgaacttatttagtgagtattttgaaaagcagttaaagaaaaaagatgatgaaacattaatggctcccttcctccaagtagaagataagagtaatatacggtcatggagttcctttttaaggggatgtattagttttctatttctgcatataaagtcaccccaaagctttgtggcttaaaacaataatattttattctctcatggtttctgtgagtcaagaaattgaacaaggtagggtagagatagctggtctcttgttatgtaatgtctaaggccttagctggaagactctaaaggttgagggctgaaatcatctgaaaagttgttcatgtctggtggttgatgctggctgtgggctagagacttcagttcatctccatgagttctctccttgagggttagtttgaacttcctcatagcataatagctgatatccaagggcaagcatccccagagagagtaagaacctgttagaatctgtgtcctttttatgctttggcttggaaaccacagagcatcacttcaaccacacttcatgggttggatcaacaacaagtatccttcaatattcaaaggaaaagaacgtaaatccaactcatagattctaccagtcacaacgtaaagtaacataagaagatctgtatattaatctttggaaaatataatatgctatgggaggagtggacacaggtttagctaatgccaggttagggttttattaagtgggacatgaaagcttagagcttgaagtgacgagaaagagggagcagggttggatggggtgagaattttacggactgtggatataaaggggctgcattagtcagttttcacactgctataaagacatacctgagactgggtaatttataaagaaaagagggttaattgacacagttccacagaccttgggaggcctcaggaaacttacaatcatggaggaaggggaagaggcatgtcttacatggtggcaggtgagaggaaaaagagtgaagagtgaagggggaagagccccttagaaaactatcagatctctttagaattcactcactatcacaagagccggatgggggaaactgcccccatgatccagttacttctacctggtctttcccttgacatgaaggggttatggggattataatttaagatgagatttgggtaggggcacaaagcctaatcatatcagggacagagaaaggagaagtgaggaggctgacattatgagatggattttgagggaataacagagatgtttaacggggatatttatgcagctttgctgtgtggaatgtgaggtaaaattgtttctctatatttttataatctttagaggaaacatcccactgggttgtagagttggatctatttttggacaaaatacattaagttgctgaatatggcttctatgtagagggagggaaaaagtagaggcctactaaatctaggttacatctgttacatctgctttcagaaaaacttagtaataaatgtggctgtcatgttaacgtttggtggttcctaaatgtcattgcaaagactgaagccagtccatggtaaaattttcattggcaagctctgaaatcagaaattagacatcatgaatctttcacaaagctaaatttgttcaattaaatgaaatgatctttattgtgagtttatatccttccaaactttttagttttaaaatgatcttttttaagaggaaatgatggtgacagtagatagtacttgtgttttggatttttaactgtccatatttggaaaagtaaaaagttactgaccaccatactttagtttctaaaacactggagtgcaatctctaaattgcaatgtgtttggggaaaaaaattcaatccctttgcattaggtatttttattgacattagatataagagaatagtataaatttacctaaatacacagaaaaataatctttactctttataatcccaaagaaatattccttagttcttttttcttctatttactatcaatatctatcacaaaagctgatattacatgaaaatattaatataaatgttacaacattatctttcttacgcaggtttgttgtgaggattaaataaattaatatttatgaagaactttgaatcatgcctagcatgtagtatggactcaaatattgctaataatattgacaattttttttgaaattgctcttcttctgtaacactcaatttatgccattggcataaatgttttgagctagacaagatattgctctattcagagttgccctggaataacttgtttctttaatcataactggtacttttttaacctatttaagctttaaattatccagaaataaaacgaggaaaaaagaagaaattaaaaacagtaataaaaccaatttctcagaaagccaaaagataacaacaaaataaactttaactacaaaagtctttttagagaagaaatattcttatccacctcatagcctagactcagtcaagggaaagggcagccaagaatatcttaagtgatatcctgggctttgttttcttgattcaagtagtgttcacattattataattatatattcttttatctgtatatctgtctattcatccatttattcatttgacaaaaattgagtatctgtgtttgagagacacaaagataaataagatatccacatccctccaggaaaatgtagcatctattttataatacttatgaatattactgaagatctaattataaaataaattaaatcatttatcaaatataaattctattaatatgagtttatatgaccacctataatgataacaagtatgagttccctcttttacttttatctggccttccctcaaaagatagagctaactacctagctactgggctgaaaatactgagttattagcctttgtgcatagtaagctggtggtcttagatcagaggtatatggcttttttccaaagacactgtgagatacgcagaacaaaaatcagaaaactataatcttttaaatgaatcatgaagtaccaaaaatgtaaagatctcttaataaaaataacatttaggatagataccatcagaccagttctgtactctgcctatactattttgaaaatcttccttaaagaagctttaactctgatgtttgaagtggctcatacaatgaaaataggtttaaatgcttattaatcacatgtaaattaaacacataacttttgtgttataatcataaagtggatttgctttgtttcatgtttcttcttaaaataatataaagcaaataaatgaaacaaaaatggaggtgtcctctgctaggtctacagttatataaggaaaaccggaaagataacataaaaatctccctaaatcaggtctatacagaaacagatttgctggatttagagagtagataatgcatgtaatctcaaatataaaatatagcaggtgactttttatggggaagttttttcttaatgttgatagtaacatatctgtacttgacattaattaatccatatcgtaaagatttgaaccagagaatcaggcccacttggtcatagaggcagtcaaggaatgggctctccactacaatttgatgtgaattgtctacttatcatgtctcatagttaaaccagatagtttggtagattctttatcacgtgtgtttctaatacaaccaggaaaacctatcgtatattctttttttttttttttttttttgtgagacggagtcttgctttgtcgcccaggctggagtgcggtggcacgatctcggcttactgcaagctccgcctcccaggttcacgccattctcctgtctcaacctcctgagtagctgggaatacaggcttccgccaccatgcccggctaattatttttgtatttttagtagcgacggggtttcaccgtgatagccaggatggtctcgatttcctgacctcgtgatccacccgccttggcctcccaaagtgctgggattacaggcatgagccaccgcgcccagcctatcatatattcttacattctctctcacacaaatgtgcatgcgcacacacacacatgcacacatatacatcattctgacactgccttaactttcagaatacaaggttgagtcctctgccacatactagcagtataatcctggatgagttacttaaacttactttgcttcagtttgaggatgaaatgagagaatatgtgtaagacatctggcacacatagtgagcattcaataaatgttaactataagtaggtgaccagttggggcccaaggagattgtaacttgcttaaggtcattaaggtagttcgtggctaagtcagaattagaatctacataatgattctcaattcaacctcctttatactaagttatctcactaattggcagctctttcctgtgttaactttctgtacatgaagggtttgccttcccaagtaagttgtaagcatctcaaaggttaaaagcattgtgagtgatatcttcatcaaccataggttctaatagagacttcttgctatttgtaggggttcagcatttatttgttaattatgagctttcaacttcacaatagttaacctgaaattgttttattcatcccatttttctcattctgtcttcagtagttctgtatataagaacagcaagccattatcattctcagcataaaattagaattgcactctgcacaactaccatcctctccctctgtaagtcctcagagaaaatcatacaattttctactatatttctgcagtatgaagaaaataatttaatatacctatgctttggtttctccatatacagaacttatatatggcattactcaatcaccaaagaattccattataatttagcttattgttatgtaaattcaggcataacccaggccacaatatgatcccaagaatataacaagtatccatagggaaaacctggtagaataactcaagagtgggaattatttttagctttggatgacttttatataaaggagctccactcacaatacattagtggcactattaactacactcgctagtaagctaatatttgaggtccattttttacatctctttgagagtatatcagtatatcaagcattacaaattactaccttgattgcctttggagctactctttttttgagacagagtcttgctctgtcacccaggctggagtgcagtggcaccatctcagctcactgcaacctccacctcttgggttcaagtgattctcctgcctcagcctcctgagtagctgggattataggcgtgcaccaccatgctcagctaatttttgtatttttagtagagacagggtgtcactatgttggtcaggctgttcttgaacttctgaccttgtgatccacctgcctcggcctcccaaagtgctgggattacaggcatgggccaccgtgcctggcccttaagagccaacctagcatatccttgtaaatcagttgcctaaacaagcttcctcttaaatatgcctttgaaaaatataaattcctctctatcagtatctacatttcactttgaagatcttatcggctttcagcagcaggtgtgcatatcctacaagtttcagttttctcttgatgctcaggatgaactaaacatctagacaagggagcatctgggaagtctgactaactggactacttggactggtttgtcctcacaaaatgtaagacttacaatctgtaggctgttacctagctcctgagagctacctcccccgggccgcccacactagatttttagtcctgagctgcatacccaggaattctcctgtttccgtgaatcaggaaggatatggcaagttaagagagaaggaaagaacctgctgagccttgccttccaagggatatcaggaagttactcaaaagacggcaaagtgctctctacacaaaagtgctggaagaactgcagttatattccctttaggaaaggaaactttaagatgatttggaaatagccaaatgtaatcacataacaaccaattttgaagtttgctggcatgcaacactcctttaggaattcttggtttccagcttggtctcattggcaacaaatagaatttcctaagccttattaggagcctgacattttgtttgagaatcaaaacttttctgtttgaaaactagagccaaactcagttatataaaaacagggatgtaagagaaagagcaaacaaggaaagctattatgttatatgtgtgcagaacataatagtttgaagagggagacttctcgatggaccagaataaatactagaatgtaatacacaactcggttatacaaggtaaaaatgagttactggcccttcaggatgggtatcatgatagctcattaatttaaataactcctaatatgcgtgtagcagtttatcagttagagagtgctttacatgggttgcttttcacaatagataacttagggcaagtgaaggcctgggtctgaaaacatattctgcaaaataagcccctcactgttaaaacctggcaaatgctaaggactccacagctagagcaaatggcttctatagttgaataatctttcaataaagttagaaaaatgggtgtccttcttcaatgcatagcatgttgggaacccaggatactttagaaagtctcttggtccagcactccgacttgtgaaagacaaatattgtcatacaatgctttggctgatctcttatttcttgtcaacctaaggtacagtgggtattaaactcttttagcttcctgaagacaaactaattcccgacctccctgtaataattgctgaacatgggaagttttggggtctgagttttaattccaagtaattcattatgtctgtcattgtctgtggtaggttgcttgcccaccactttgccagtatcattatctgtgacttgaggcaaatggtaaggacagcttgtctgagtctcagcacttgggtggcagatgtgacagagatagataaattggccagagtgagtattttaaaccagaatactgcccccaagcccagtatgggaccatctacagtatggaaggcagctcagacataggtcagtttgttcaggagaccacacattatgatctgttgagctgttcatcattttcacttgaaaatgaggggtggctgtttttaggctgtcagcctcagatttgaattctatagtgattaggtggtgaaatggctgctctctgcagactgctcaggggctgttagagctacacaattgccctaaaatcaacaggagcaaatagcctcaccaaaccagccttgagtcattcctttaagtgagggtgattaggagggtcagctatttttaagaaagaaattcaataatcagtctgtccagagactcaaaattatttatcatggcattttccaatgtcacctttcctcaccatcactttgttggcattaggctttgagacatggttctcaccagcaagatggttatttttatgtcttatcaaggtctctaacaggtcctatgacacgcaaatgttagaaaggagaataaagcaacaattgagtaaagcaatagtacagtgggaagagagacaggaagatgatgttgccatgttttagtttaatataaattgttaatatctttgtctcagtcactgtatagaaataaaatattttcagattaaaagatcctagatcttcattgaatcctacctctcttaacctcagcccttttggaaaacagcacaaactccaaactgtaattcaagctctaaaataaaaggctgggctggatccaaagtgttttcaatatttttctggtagatttttactggtttttcatgaaaagcacttaattcaaatattattcttccatcttttaatgttttagtcaacagtaaatgatactctcttctgatatactcctctcaaagtggtagaagagtttgtggcaaattgccatttcaaccatttattctgctccaataatgcagtattgaatacactgaagcacggaaaaattaactaaactacttttatgcactttcaaaagaagcaacagaaaaacttggcaaagtaataatagtgaaattttattgcttctcaatagattaatatacttaataatatcctagaaaatgctgcactttgaaattttaacatgtaacagtgtatatcttaaattaaaaataactgtatagtccagggtggttatttatactttatatagtctatattctttgtgagatttgggtttaaacacatcagagtttaaattctgcgaagactgcagagtaaagaagattaagatggagggaaggaggaagagcaggaagagggaaagtaggtatagaggaagaagagaaaaggagatagtagaaaggggaaaggaagatggcagggaggaaggagaaatacctcaagtccatgaggggttagtgctgaaggataccttcatcattaagtaaagggtgaattgcactgggttgtttaaaagcatgcccagatactgctgggtgcggtggctcacgcctgtaatcccagcactttgggaggccaaggtgggcagatcatgaggtcaggagatcgagaccattgtggctaacacggtgaaaccctgtctctactaaaaatacaaaaaattagccgggcgtggtggtgggggcgtgtaatcccagctactcgggaggtgaggcaggagaatggcgtcaaccccggaggcggagcttgcagttagccgagatggcgccactgcactacagactgggcgacagagcgagactccgtctcaaaacaacaaacaaacaaacgaacaaaaacaaaaaaaaagcatgcccagatacaatcctaaagtatgcccagatacaatcctaatgcaaaattttatcagatggaaaagtatcaaaagctggaataaatagaaaaaggagttcatgaaatgtattcaaagaaattttaaaaatagctcaggtacagaatctgttaaagcaacaaagcagacacatgactcttcttaatcttccacacttgactccacggcattaagttaacacttccttagtctcctctgagttgagacaaatttcctgaaaggaaggttgacattccctggacactttaaggatctgtttgtgcctcatgggtataggttgtaaaagttctttgcatagatatgtcagcattttagtgcattgtttggctccaagtgacctttcctccctgcatttcctcatttgccattcatcttcttgcttcccttcgtctgccataatagtccctggggtatagtataagtgcttctagggcactcctctaactgcacggttattgttactgcacaattaaaggacttagatattgaaaaatggtagtgtttggaattctgcaatctcattccttaggggcagggaacaattggaacacctaaaaaagggtcagagtccagaaccagattcaggagagagttcagctttcaattgggttggtccatttttcagtgctgcccgcacgagctgtcagttgctggaactgcagagtatttcaaggaaaggcgcggctaagcagaggtgaaatctttagacagatgagtctcaaagaggaaattatgcagaagccaaatggctacaaatggtactgaggattgaaacctaaactataagtgaaggtctcttccctaaatgatacactcagacttaacaataagctaataaggtggttcaataaagaaaatgtgggtctgatggaagagtagagagtttagaaggtgagtaagagatatctatgatattagcttgggtgtgtttttggtattgatgccattgtgttgggagtacagcagaaggacaaagaactcctttagcaacttggcctgcagtcaaataggccaacattggaatctgagctccactgccttcttcacctgggactaatcacttaccctctcagtctcctcatctgtaaaaaaaaaaggataataataataataattgttacctttggaaaattacacctttctcttctgtacctttaacctttctctcaactagatactttccatgagactcaaaatacattcaagtgtcttctgcattaaaaacaaacaaaacaaaaacctcaccttcaaccacttatttccctatgttagggtttctcttgacgtttggggctagataattctttactttggggctgttctgtgcgttttgggatatttagcagcattctttacccatgaaaatattgtgtccctcgccccacaagttgtggcaatcaaagttgtctctagacattgccaaatatctcctggaaagatgcccaccccccaccccagttaggaaccactattctaatgactgcctcatctcttgtctcccttgcaaagccacacttgcccagttttgcctattctctctagctatattcctcacttccctatcacagccgatcctattctagtctgtctcttgttcccattttaccaataaaatcatttttagtaagaagaacaataacctggatagttctaaatgtaatgaatattgcaattcttctcttccttgatttctcacaatttgaagtgtgttcttctcctggctcctctgacactattctctctcggcttgatctgtgaagcctgggtctcctggaatagctgcagcctttctctccactttcttaccatattctctcactgtgtccaggacactagctcagactttttcaaatgctgattaaagggcttccatgctgacagagggcaaacctcacagagcaagcttttcttaagcttttgcttatatcacatttgctagcactctcttggccaatgcccagagtcacatgggaagagcctactgaaggcagaaatacagagagagaagacttttggcataacatcttgagggcttcctttaacccactccccagtaaaactagtgaaaactatgatcaaacaaataaaaactccaagcacttaaatcctctggaaatgatcctaaggacaaatagcaaatgaagaaacatctattcaagaacatttatgaaaattcaataagaaaggcaagcctgtggtatttaaaccaagactgctccctctcacccccttccaagttcagggagatggagcttccattccaggctggtgcaatcaagaacacagagctctctcccctccagctggaaggtttcttcctggaaggaacagaacttcagtgtttctcatcctggccatagttacccattgctaaggctaagctctggtgaatacagtagagaggtaggggcttcctcccctgccaaatcccccatcattgaatggaggggataccttaggcactgcatgctaagaatacagaggcctcatcatccttgcctggcctcctgaggtgggggttccacaccaggagagataaatatagaagatattagagtgctgccacctcccaactaagctaagctcctagagtgggagtttcatgcagtcatgcaggaagaacctctccattttctccacctccatcttgagaaacatggcttagagattttgcctggtggtggcgggggcaataatccatcataaaataaatattcttaatctcttcccaaagggcatggcttcatttgcaacaaagtatggaaaagttcaagccttagagtgcgctcaagaacagtggaagctatggtgaaaggcaattgggaggagagtcaagatacaggctaaattgcagactagtttgcaggagagaaccagagaaataacacagctgggaggagccctgacttcgaactatttcttcaaaggagacacaattcgattgtattagtgtgttgaacaatataaggttgtaaagcactgttgaaaataacacagcaattgttcaccaattagtggagttgaacagctgaatgtggttaaggaaagagtgaaggacaatcacacgaacatcactctcatgccggctgggctgtctgtggacatacccaaagatgtacctccctgatagcaaactcagtgacttaactgagggaaattaactcacctgactgtgaaggaaatatacttattaaaataatccagcccctcactaaacaaccaaagaataatagcaagccctgggtggtggtagggggagtaagaagagttgctacagtatattatctgcaatatccactttccaaccaaagatcacaaagcatggaaagaaacaaaaaatataacccatacacaggataaaagaaccagatggcagaaactatgggtgagagggacccagatgttggatttaatagagagatggagaggagaatgaatgcagccagtgtgcaatgtgtcatgtcctctaaatgttcaagtccctcaagtcatagatccacctattttttctcaagttaatatctctacacctagttttaattccctgtcatgtatacaggactcacacattttatcttcaacttaggccttccctctgagctccggacctgtgtatcattcagcctttttgaaatctctatccatatgtctcaaaggcacttttgattaaatactaccaaaaattaactccctctatctcccagtgttctctatttcagtgaatgataccatcaaacatctactttcaaaatcaaaactctgagataaatctctaacagctccctgcttatcaccccaccccatcatattgaaaaccaaacccatttaaatacctttcgtttgtgtcctcctctctctacctccaccaccagtactgtagtgtaatctgccatcatctctcacatggattactgcacaagtctcctatctggtgcccaaattaggagcaccctcctaactggtatccaatctaatctctacactgtagccagaaaaaatcctttgaaattcaaatctaatcatggtatgtgcctcccccttcttctatggagaccataggaaagaaaccgaaactcctgtggtgcttgagttgatgctagtaacctctaaacctcatttcatgcctggatctgtcacttcctgaagctccatgataaagcacagcctcctcaccctccaagtgcgggggttctctagttgtctcttccaggtgccaccagagggacttctctcataaaaggcctgtgcaccctatgctctttctctctctgttatggacttccttccagagagctggtccccattccttgatatgggactgtccacttgtatgagtaataaaaatccttctctgatcataccaaagaattggtgtcatgagtttttatattagaagctaaacttgagagggaacttccccatgtcacagtgaaggtgtgatgataccctctttctaccatctttaaattcttccgtcgcttccattccattttctcttaggataaagttcacaatccttaggttggcctacaaggtcctctacagttaggtacccccgtctgctttccttccttccttcacattagttatgctccccactgcctgaaaacatgcagacctgctgcatcctctacctgaaatactcttctcctcacccctgccagactttacctaatttgcccttcgtttgtctttgtaacaccgctcagaaatctcttcctcagaaaggccttctctgacacctcagcacagtcctcctcacgaggtcagatgtattttttcttcaaggcactgactttggtttaaaatttgtatttattcatgtaattatttggagtgcatttatcttcctcactagatataatcaccattagctcaagggctttatatgttttgcttgccattgtgtcctcagtgcctaggccattcactgacccacagtaggtgctctgataaatatttgttgagtgtagaataaatgaagacccttagaagcataaaatatataatctcaaagcagaagatactttagttagaataagttaggttcaactatattaacactccttactacacacacacatagctacactcatcaattttggtggcttacaccaaaaaggcttatttcttgtgcacactgcattcttgtgctttaacaggatactccgccctacctcatctttattacagaccttggctgacggaggctaccacttggaatattgtctattttcaaagtccagcagaagagaagttaagaagggtttcactctggcaattaaatattccagctaggaaatgacatactttatcttcatatacaatccattggccataactagtctcatggtcctgcccatttgtaaaggggaaataggtaatcatctcatgcattgaggaggaaagaagaattagatacatgtgaccagtagaagtctccttactgacattttaatgtagagctgtatgtgattaaagttaaaattgaatctgaagggctgacagaaaaattcaagaggatatgatatttaataattgaacgaggctgaaagatgaaatttggacagattgaatgggtaggccttgctagcaggaaagacaaaataaacataatcaagaagtatgtatgaacgtgtgcccagggcagtgaggagtgatcagcctccttgaagtggaggatgtgtgtcaaggaaccagaggagatgattagagtggcagacctgattattagcatatccatgcttctgtctgaagcctttttggcctataatgtagaaatatccttggagtaagcagttcagcatatggttttagacatataggtcatcttggctggattgcatattcttcatttttaaaattccaggctgtattggttgatatgcagtccagaaagagctggatctgacttaagaaaataaaaactgctttaatccctcttttcagcccattgtctatccattagcaggtaaacaccagtgtccctgcaagtgtgtgaactgagcttccttaatttcacctttaattggcacttctagtgacttaactgagtgaagagacccttagcaatgatacaaagtgaaggatggtatagaataataggttttctgaaaacctgaatgcaattgaagggtgctatttaataaatctgtccctagaagctaatagcacgtagtcaatacaatttagcctattttctcccatgttacatttgttagttgtactggttttggaaaaggaaaagtcatgctgttacagttccactaatagaaaacagataatttgggaggaaattagattggaataaaagcacgttgttaaacaagaaatcacaataaagtattgagtagagagaaaccgttaatggagacagctatgtcatacctaatatgccctcttttcattgatccttagaggaagcataagatcgcagctaagtatggtctcttgagccagcctgccatgattcaaattgaaactccatcattcaccactgtgtgaccttgagaaagttatgtaatcattcttggatagtgattcttactgctatggacagatttgtgttccccccaaattcaaatgttgaggcaactgtgtgaggagagagggcctttaggaggtaaagttaaatgaagtcataaatgtagggtcttaattcaataggattagtggccttataagaaggggaagagttttctctttttctttctctacttgcctgcaccagggaaagtccttgtgaggacacagtgagaaggtagctatctgcaaactggaaaagagtcttcaccagaacctgaccatgctgacacacagatctcagacttgcagcctctagaactgtgagaaaataaatgttgtttaactacccattctatggtattttgttatgacaacctaagctgactaatacactcacctataaagcagggataataacagtgcctatatgatagtgtgtttacaaggatttaatatatgttagtttatattattttatgtccatatatgttagcgtatatattattttatgtctatctctaattcctcattgaggatacttaagaattctactttccatgtttgacagacctggtttggatttcagttccacctcttgtaaactctattaccttgagccagtgactaatgtatctaagcctccattttcctatctgtaaatggggatgataactagtgctgcttgtctcttcaggttgttgtgaggattaaaggagatatgcatgacaattcatctgccaggtagtaagcattccaaatatgctatttactgccatcattagaggtttgctgagcttcctcttttgcattaagtaagagactattctctccagaaaactttgaactacatgatggaggaacaaataatagcagtttctcctcaaccttggaactctaaaaatgttttttctaagccattcttatctttattttgtcattaaaagatacatgcattgtgcattttgcttttatttaatatatgccatgagtgtctttctccctatcatgatgtcaatgttacattacagattctaaggagcaggggccatatcccttaaacatgatttatttaaaataacaatataggattggatgtgactactgcttttgcaatgaaactgaaagatgggagagtgagatttttctcacagctatggagtggcagacctgagcactaaaatccagtctcagaacccagttattatctcacaatgtgaaggcaggaatctatagacagattattgaacatctcatgtatcatatcatgtatatcattaagcttatatgtatgacaaaatagtattttgtgcagcagtgcttctcaaacattaataaatgaatcacctgaggatcacattaaaattcagatgctgatcagggagtctagaatgggactgaagtgctgcatttcttttctttttttttagactttaagttttagggtacatgtgcacaacatgcaggttagttacatatgtatacacgtgccacgttggtgtgctgcacccattaactcgtcatttaacattaggtatatctcctaatgctatccctcccccttccccctaccccacaacaggccccggtgtgtaatgttccccttcccgtgtccatgtgttctcattgttcaattcccacctatgagtgagaacatgcggtgtttggttttttgtccttgcgatagtttgctgagaatgatggtttacaccgttggtgggactgtaaactagttcaaccatcatggaagtcagtgtggcaattcctcagggatctagaactagaaataccatttgacccagccattctgttactgggtatatacccaaaggattataaaacatgctgctataaagacacatgcacaggtatgtttattgtggcactattcacaatagcaaagacttggaaccaacccaaatgtccaccaatgatagactggattaagaaaatgtggcacatatacaccatggaatactatgcagccataaaaaatgatgagttcatgtcctttgtagggacatggatgaagtgctgcatttctaacaagctcctaaacgatgctaaatctgctggtcctcagactactctttaagtaacaaggatatagttggttttagcaatagtgacttaaagattttttgctatttttgtttttatctacccatttttgtattcactaaaatgtgttctggatgcaaacttctttaatacaaagggaaaataaattaaaagccaactttgcaagaattgaattacacacattttaaacttaaaatgcttcggttcatttctctgtatgttgtgtattcctaaatcattcacaatgtctttattttttaccccttttttatcaaatgaggaagtagtactcctctgacttttttcagtttttatcttccataacacattaaatcacctcaaccttcctaaaaagctctccttgttttctgacttttaactgtcttgagtctccatttctcaacccctaagtcatgcccaaatcctgttctctgacattttctcatctctcttactttcttctccttgggaactcccatccactgccacatattcaaacattaaattcagctctctatacacttctgcatcagtgtctttcattccaaagtcttttctaagttttattcttctatgcccaatggattggatacttatgacctcacagccctttaaactcaacatgtcaaaaaccagaattcatatacttcttactgttaggccccaagccatctgcccacaaccaccaggttatattgttccctttatcaaaattttcagtgattatatttacggtggaataaatttttaactctttattctgacattgaaaattgtcgtctctccaacttcaatatttttttgtacctatatcttccattgcttttaaatatgtggttgacttaagtttgcctgaatcctgtttccagaatgtgcctggaaactcccaacctccatgccatttcactctgaatctaaagatctcgtaccaatctttgcttattcaaatgttgcatatcttttaaggcctacacgaaatgctacaacttttgtggtatattctctaatcccttacctgaaagtgattggtccctcctctgcactgctataatgcatattctttgctatttagaagacagcccatgctgcactatatattatagatctatgcaaatatctgccactatctgaaacttcaaggctccatctcttctccattattcctccaaacaccactcacagcaggttgttgtcagtaataaaattttattgaaagttttggggattatgcagggcaattatagcagaagcaggaatcaactggaattagagtgatagaaccacagcccttagacatgtatcagacactccctgaccaagtctgtccatggacacagaactcctcacctccagatacttcctcttgcatctcttctaccagtatcataaccctcacaaaaatgacaaaactcaatgccttttacttcgttatgcagtaatttcccctcttttgttactgtttaaactttccagcgctttgagaggccaaggtgggcggatcacctgaagtcaagagtttgagaccagcctggccaacatggtaaaaccctgtctctactaaaaatacaaaaattagccaggtatggtggccagtgcctggaggctggggcaggagaatcgtttgagcctgggaggcggaagttgcagtgagctgagatggtaccactgcactccagcctggaggatagattgagactctgtctcaaaaaaaataaaaagaaaaagaaaaccctcaccttctataatcaaataggtttttaagtgttttcctaagcttgatagcacttcagtctctcagaggaattctgcagtcctgcagttgtcttgggtcaaccagccaaaagttaactaatttgcataatggcagccccataaaatgcgcaaaattattatcttttatatgaatgcttattaatatatatatatatatatatctccttttacatctatctagaaaacgttttaagggaagaatcatatagcttcaaacatttttgttaattacaatatggaagaaaagagagttcaattccttaatctatcatgtgtgagttaggggactttaagcaagttattttcttaggaatcctgtttcctgacctatcaaatgaatgtaagaatagctacctcacataagtgtgaggacatagataatttctataaaatcatttagttagagtcttggcacatagtaggagccctgctctcagtacaagtttaaaatgtctgttgaatgctaaaagattactccattgagctttttcaaactttaaagtgagtatagtgtttcactgtaggattccaaaagctgtttgatgctatgatttctttctcaacatcatgtttactctgaagacatttccatagtgttctacccttaattgaacagagataggaaatcacgactttaaaactttcagcgttaagagtaaatgacacattagtttagagacatatcaataattatggaagtatcttctcaaactgtaatgttttcctctgccttagtgctagcaatcaaatccactgaattaatctgagcagggtcaggactttgaacctgaggaaaatcacttgaatttgaggcattaagtgtgcagtacaaggtgttccagctacaaattttctgaatcctatttcaaagcaatggtgcaggagaccagatagccacctcaaaacttctgagtcccatagtgttttggtatggctccagaagcctgttgctgccccagaaaagggagatttcaccatttctaaagggttagctgctccctggggatgacagataggtggcaaaaattggaatgtagaaattttccttatgttctaaaattgcacagaaattttctagggaaatattctttatagatttcccaattttgttgactaatctcttcatctgaaatgtttccctccatgtatgaattttctctctgtctttctaagtccagtgtagaatcgatttggtatctaccgactttccagattcctccaagttgggataaatcatcatttcctcctctgtgttcctagtgcatagaaataaaatcatttatcacaatctttggttactgatgatggtggggaggtctttacagtgtgatggcttgaagtacaaagtacaaacttgaaagtcagattaccacttactttggaccttaggcaggttacttaaccccactctgcctcagtttcctcacctgaggacttaataatagtagctaagcaaatgaacttactaatagtagctactttatgatttttattaggattaaatgtaatggtgcatatgaaattagtaaacaagagttgcaaagtagaaaactgtcagtgaatgtcagctctctctattatccctcagagactcctcctgccactttaggtagaaagctccttaataattgtgaccataacatgtttatttctttgttggtatagtcagtgctcaatacattatctgttgagttgaactgcatttttgacaggagacaacttaagttataaaaatcctattttctatttatactatcataaaagtcgtgatggctatgcttttaacacttgacctacctgaatgtggatggtttctaaaagtaaaataccttttaatgctgtttagagtgtatggcaggatcagaaaggcatatgtgccatggcttgaatatttgtcttctctaaaactcatgttaagatttaatccatggccgcgccccacagtggctcaggcctgtaatcccagcactttgggaggccaaggcgggcagattacgaggtcaggagatcaagaccatcctggctaacacggtgaaaccccatctctgctaaaatcacaaaaaattagccgggtatggtggcaggtgcctgtagtcctagctactcaggaggctgaggcaggagaatggtgtgaacctgggaggcggagcttgcagtgagctgagattgcaccactgcactccagcctgggcgacagagtgagactccgtctcaaaaaagaaaaaaaaaaaaaaaaaagaagaagaagaaaagtgtcagtatagagaagtgagacctttaagaggtgattgggtcatgagggttctgctctcaagaatagattaattgatttctggattaataggttttcatgggattgggactggaaggagaggaagagagacctgagctggcatgctcagtccccttgccatgtgaaaccttgtgccaactttggactctgtggagggtccccaccagcaagaaggtgctcaccagatgcagccccttgaccttagatttcttagcctccgtaactgtaagaaagtttcaggtattctgttataagcaacagaaaatggactaggcagcatgtaaaccaaattaatcaacatacacaaatttttgtagcactattttactcttttatataacaaataaagccttaaaacaaatactattttgaaagaaacttacatgaaatggtcataagcataatttaaactttaaaattacatatgtaaagttttcattgtccaaacatgttgatagacaaaatggaaaagataaatagtttgtacagttctctcttcttgaaaagtattgctttgattaaaattcatattgtcccaacattgtttaattcataaatagtaaaataaatatggaacatttttttcaatgcagtatttgttttccttgaaagctttcaaaagggagagacaagaatccccagaatattagaaatctttcatatttttattacaatcactgtaatcctgaatatttttttctagcttgaagcctaaaattaccagtactttaatatacaagatgaaagtttgtttactcataccactgcatattattgtttgaaacaatcatttctggcaatagtcatacctctgcgtattattgtttcaaacaatcatttctttcaatgactctaaataaaaaattcctgcttctctttaaaaagacagtgggaataagtttctctccttgagcaatggggcccctactctgcctggttttcttcccctttcttagcacagacaccactggaagagctgagccctcatttaagattgattctatattagtttcctaaggattctttaacaaatgactgtaagctgggtggtttaaaacaacagaaatttattctctcacagctctggaggtcagaagcctaaaatcaaggtgttagcaggacttgttggttctggagactttaggaaagagtcctttccttgcctctctccttgcttctgttgattccaggcattccttaacttgtggcatcataactccaatctgagttgatggaagtagagatctccatcagtacatggtctttttctctctctgattctcttcacttcttctgttctcttctaagggcacttatcattggatttaaactccaccctaatccaggatgatttcaccttgagatccttaattgaattacatctgcaaagatcctttttccaaataagttcacatttacaggttccagatggacatatatgttatggggccggtttttttttttttttttttttttggagacggagtctcgctctgttgcccagactggaagtgcagtggcacgatctcggctcactgcaagctccgcctcccgggttcacgccattctcctgcctcagcctcccgagtagctgggactacaggcgatggggccgatttttaatccactaacaggtaccttgagactagggctcactatactttggtcagagatgctctaggcatgaagattatatttgcatgaagctaacattttttcaagactacgtgattgcactgctcaaacttacattatggtttccagagacagctagagcttccttgttcattaactttgaaaggaagcattttccctgggaagaggtgcccaagcctcttttgtaaggtgggcttgtcttaggcagtaactaagcctagagtcaggtctactaataatccattaagatgctgtgttagaaaaatcctctccaaatatgatggaaataagtatgtataagaagtatttcacagatgaacacattcccactttattaaccaagtgcctgtgtgcttgcttaaatttttcacattttcagacacttaacatattatagaaaataacatccaaagagaacatgatgtttagctttttggattctttgggataaagagcaaaccaattttgaattaaaaaaaaaaagactgtagataccacatccttaaataactcaaaagttttgtaccaaaggctactttttaaagttgaatcaaaatgaaataggtgtgaacacctatgttttgagaggcagagaaattggtttttttaaaaaagtgggaataagtgagtattttttaaaattgaaaagggtgtagattgggttcctcagagattgctaaagctgatatcataaattacctaaggacagggagaatgaagtgaattgtgtaaatgtctacaatattatacttttcttgcttatactaagctaaactagtatggatgacatgtagtaaaagttataaaaggaaattcatcttcacctgtgtacatgcaaaactgctgcatttgcagattaagtcaaaattatatatagagagagacacacacacacataacacacacacacatatattgaaaatctttaagtacatctaattttttatgactcagaaaagaatccttatttaagccctttttactacagcaaaaaatgttaatgtccattaaattaatggactttgctctgatttggggatgataattgcagaaatgagtagggatatatatatgatctaatatatagaaatggatatatagaatatatatgtatatagaatatatagaaatttctaatatatagaaatttctaatatatagaaatggagcattttaaggtctggaactttggggctgtcaacagttataagaaaatataaagagagatatatacagagagagtaataacaggtagtcccaggagtaggacaggagattagtggcccagaatcaataccatatttgttctatttcatctttttgcaagacaaaatagatacccagggggctggggaaggtgaccagtaagttacttccattattttctttttctttttcttttttttgagatggagtctcactgtgttgcccaggctggagtgcagaggcacaatctcggctcactgcgacctccaccgcctgggttcaagtgattctcctgtctcagccccccgactagctgggattataggcgcgcaccaccacacctggctaatttttgtattttcggtagagacggtgtctcaggatgttggccaggctggtctcaaactcctgacctcaggtcatctgcccacctcagcctcccctattactttcttcctttatccttttctactgtttaaaagctcaaaacttgttgaaactccctctccatcagattctgtgtgcccaaagaactgtccttggaggagagtttcaaatgtctttcattttaatgtctggccttggtgattgtttaagaagtcccctgaatgaatttttgggtgaactcggggcctagactggctcaggaaatctggcactgagccccatatttactttggccaaacacaatacttgctgtgcagccacattcactatgcactgctcacaccacgcagcttgagagctttgtccctgattcaaatctgctgggtattattcagtctgaaaatttacttttacaccaagcatataaacaaaatgaaatacagtttaagaaatcagctcataacatttacaattaaattcattaatcaaggcagcttatggaaatgccacatgtgaactgtaaactttataaatattcaagtagtgaacaactagacaatcacattggcagctttgtttcagtataagtgatgtagaatattaccatccatcagcttgcagttttgttttaaaacttgttgaaccatgtatatcatcaaaaagaacttttggttacatttctgtttccatatgtttcccatttaccttcctctctagatttatgtgccttcgtactaattagcacctgcactgaattcagaaagcagcacttgaatcaaaccaagtcaagctgtctgtgaaggaaaaaaataccaagttccaagatttcttgttaatggagatgaacagtacactttgttgatgttcttattcacatgtgtcttcttaaagtatgagaatttagtatatgttctttcagtatatgcaaatatatccacatgggtattttcaaactatgctgcagtgtgctttgtctggttaccagtttttattctagtacaagaatgcaggatgttattcgtcacattcacactatattaatttaacctcctaggtctgggaggagagaggaggaaaattaaaggaggcccaagctttgcatttgagagaaaaagtgaactgggtcttgaaagatgtcttaagaaacaaaagagagaaagaaaatagaggaaatgttagaagttgaggtaaaagtgtgtcatggagtaaagaagagcatggagagaatactattagtcaagagaaactgcagctcaaacactcaaatgcagaagcatcataaacaagctaaattccactcttcctttagttcatgtgttttggtctatgtaagctgaagacaaactctcctttttccatgctcccatacctcatagaatgtgtttggaagtattctctcctcttctatttttcagaataaattgggaaaattggtattacttctttaaatgtttggtaaaatgcagcagtgaggccatcagatcctgggcttttctttgctgggagactgtttattattactttgatctcattacttactattggtctatttggattttggacttcatggttcaatcttggtaggttgtatgtgtctaggaatttattcatttcttctagcttttccaatttactgccatgtagttgcttatagtagcctctaatgatacttctaatttcagcagtatcagttgtaatgtacccttcttcatctctgattttatttatttgtgtcttcttattaagatgctatgttagaaaaatcctgtcagagtctggctaaaggtttgtcaattttgtttatcttttcaaaaaatcaactttttatttcactgatcctttgtattgttttcttcatttcaatttcatttacttctgcactgatcttgatcattccttttcttctgctcgtttttggtttggtttgatcttgcttttctagttctttcaggtgcatcattagggttttttgtttttgaagtttttcttctttttttgatatagggtataaactgccctcttattactgcttgcaactgtacccgttaggttttggtatgtttctgtttccataaccatttgtttcaagaaatgtttcaatttccttaatttcctcattgactcactgctcattcaggagcatattgtttaatttctatgtgtttgtttagtttccaaaattcctcttattgatttctagttttgttctattgtggtcagagaagatactttctattatttcaattttttttaatgttttaagacttattttgtggcctaacatgtggtctatccttaagactgattcatgtgctgaggaaaaaaatatgtattctgcagccattgatgaaatcttctgtaaatatctattagttccatttggtctatcatgctgatcaagtccgatgtttctttgttgaactcctgtctaaatgatgtgtccaatgctgaaagtggagtgttgaactctccagctattattgtattggggtctacctctctctctagctctaataatatttgctttatatatgtggatgctctagtgttgagtgcatatatatttacaattcttatatcttcttgctgaattgacccttttatccttatatagtgaccatgtagtctctttttatagtttttgtcctgaaatttattttgtctgatataactgtaactattcctgttcttttttggtttccatttacgtggaatatatttatctatccctttattttcagtacatgtgtgtctttatcagcgaagtgcatttcttgtaggcaacagattgttgggtcctgttgttttatccattcaactactctgtgtatttactggggagtttagtccattgatattcaatattagcattggtaagaaagaacttactctgccattttgttgttttctggttgctttgttttcttctttcttctttccttccttcctgtcttcattttagtaaaggtgattttctctgctagtatgtttttaatttcttgaattttattttttgtgtatcagttgtatgttttttgatttgaggttactacaaggtttagaaatatcatatcataactgattattttaagctgacgacaaattaaaactgattgcataaacaaacagacaaggaaagagaaaagtaataattttacactttwactttgtcctcctactttctactttttaactttcattgtttcttttttttttgagatgcagtctcgctctgttgcccaggctggagtgcagtggcgtgatcttggctcactgcaagctctgcctcctgggttcacgccattctcctgcctcagcctcctgagtagctgggactacaggcgcccaccaccacacccagctaattttttgtatttttagtagagacggggtttcaccatgttagccaggatggtctcaatctcctgacctcgtgatctgcccgcttcagcctcccaaagtgctgggattagagacatgagccactatgcctggctgtagttattatttttgattggtttgtcttttagtctttctactcaagatattagtagtttaaacatcgcaattataatgttatactatcctgcgtttctctgcatatttactatcatcagtgagttttgtatttttaattgattcttattgctcattaatgtccttttcttaagaaatccctttagcatttcttataggacaggtctgttgttgatgacatatcaacttttgcttgtctcagaaagtctttatatctccatgcatgaaggatatttttgctggatatactattctagaataagaggtgagatcttttttttttttttttccacactttgtgtatgtcataccactctctgctgtcagacattttggagcgccactatatattatttgtttattttctcctgttgcttttagagtcctttctttatctttgacctttgggagtttgattattaaatgccttgaggtagtcttctttgggttaaatctgcttggtgttctataaccttcttgtacttgaatattgatataattccctagctttgggaagttctctgttattatccctttgaatacactttttatccctatgtctctctccaccttctctttagggccaataactcttagatttgcccttcagaggctattttctagatcttgagcttgtgtttcatttttgtttgtttgtttttctttcttttgtctcttctgactgtgtactttcaaataacctgtctttaagctcactaattctgttttctccttgataattctgccattaagagactctgatgcatgtaaattacacttttcaactacagaatttctgcctgattctttttatttcaatctatttgttaaatttatctgatagcattctgacttctttctctgtattatcttgagtttcactgagttttctcaaaacagctattttgaattttctgtttgagaggacacatctctgtctttccaggattggtcactggagccttatttaatttgtttggtgagatcacgttttccttggtggtcttgatgcttgtgcgtgttcatcagtgtctgggcgttgaagagttaagtatttagtgtagtctttgcagcctgggcttgtttgtacctgcctttcttgggatggttttccaggttttcaaagagacttggatattgtgatctaagtttttgttcactgcagctatgtctgcattagggggcaccccaagaccagtaatgccatggctcttgctgacccatggaggtgtccccgcttggtgttcttgaataagatccagaagaattctctggattactaggcagagattcttgtcctcttcttttactttctaccaaacaaatggggtctgtctctctctctctgtcttgagctacctggagcttggggaggggtgacactagcacccttgtggccaccaccactgggatggcgctgggtcagacctgaagccaacacagcattggatctctctcaaggcctgcaatgaccagtacctggctactgcatatgtttgctcaaggtcctaaggctctacaatcagcaggtagcatagccaacaaggcttgtatctgtcccttcaggacatcaagttcccctttgccctaggagaatccagagatgccatatgggagccaggacctgaagtgagaaatcttaagaagctacctggtgttctattttacgtgactgacctggcaccaaagctataagacaaagacctccccgttcttccctcccttttctaaaagcagaggagactttccctgaggctaccaccaccctagacctatggcaagtgctgcctggctactgccagtgtttactcaagatccagtagctcttcagtcagcttgtggtaagtgaaaccaggcctgagattctcccttcagagcagtgggctacccttttgctgagggcaggttcataactgctgtccgagagccagggcctggaatgggagatcccaagggcctgcttggtactctaccctactgtggctgagctggagcctaagctaaaagacaaagtcctctttacccttctttctccttttctcaagcagaagcagtcttttcccataactactacagctgggaatgttctgggtcacacctgaagccagcatttctcagtctcaccccaggcccacagtgagtaccacctggctattgctgctgattattcaggggccaagggctctttagtcagcagatgatgaatgctgccaggactgcttccttcccttcaaggcagcaggttcccttttggtccagggtatttctaaaaatgtcatccaggaggtaaggcctgtaatggtgggctcatgactctgccttttgccctatcctaccatggataagctggtatccaaattgcaagacaaaggcctctactcttccctctcctctccttaggtggagggaaggagtctcacctgcagctgcaagctgctctgcctagggttgggggtggggtggcacaagcactcctttggctgcccctgctagtgtctcactaggtcacatgtcccccataaacactaattctaaacccatcccagcatcagtacttgcccaggaatttcagtctttgtggcttagactgtcgttcaagtttatttagtaccccagaacactttaacttatggcagtgaggcttgctggatttcagattctgactgctggaatgggcaatttcactctggctagggctggtctatattctccctccactggcgctagctgagttctgcccagtgttgctttccactgtgacagggcagcactgagttccaaagcaaagtcccccagtcgctgcactctccctyccccgagcacaaagattcactctctgtgccacgtggccactgctgacgcatgggggaggggtggcatcggccattcaagactttctttcctaccctcttcagtgcctttttcactgatatatagcttaaaccaggtacagagattgctcacctgatttttggttcttagatggtacctttttgtgtggatcattgttaaattttgtattcctacaaggaggatgattggtggaggcttctatttggtcatcttgctctgcctttccaaaataatttttattctgtaacatgttgccctgttacccacaaaattgataaaccagacttccttatcttcacccaggttgttggttaaaatgcaaaattagaattctggatgtcctttgaatcatgtttccaggttaatctcaagctattaatcaatactgtctgagtacagtatttaaccagcaaccagcaattaatctacccaagagactatcatcaacatcacatttcaaacaacaaaaatcaatgatatggttacaacaaaaatcagtgatatatttaatagtccatgttttttttctataaatcaatattgcgtatctggcactgtagtactcatatctatcccatttcttttgttgaaattctcaataacctcaacttttgatttcaaatgttaggccttattatatttaatgagaattaacactacttaataatgttcatattatatgaatggccattatgctgttttcgtgttttaaaaaaagtttgcaaaaaacattaattttttgcctaaattattttgaacattagacatgttatattttagcaaccctaataataataatttttaattattacacttaatatcctgcccactttgaaatattgacatcatagagcttatgtatgagacaggtaattaagtagttaacatttagtaaggatgttttatgtggcaggtactattcttagcattatacacccattaccgtacttaatgttcacaccaacactatgaggtagacactttttttaatatactttaagttctagggtacatgtgcacaacgtgcaggtttgttacataggtatacattgccatgttggtttactgcacccattaactcgtcatttacattaggtatatctcctaatgctttccctccccctcccccctccccccaccacatgacaggccccagtgtgtgatgttccccttcctgtgtccaagtgttctcattgttcagttcccacctatgagtgagaacatgcagtgtttggttttctgtccttgctatactttgctcagaatgatggtttccagtttcatccgtgtccctacaaagttattatcctttccagatgaagaaactgaagttcagagaagttaagtggcttaccaaaagtcacacgaccaggattcaagcctggataatgtggctccagggtctgttcccctaaccactatttcataataaggactatcttccaactaactctgtatgttacatactgctagttcaaagccaggtagacgaaaaaatactccctgtttcagctgaagaaggttttccaatatatttttagctgcaaatataaaataccacaaagccaatttacattaaaggagaattgtacattcaacacatcagcatttccacaggattgtagaataatatattagaacaaaaatagtgtttgtaatagaaatacagttattttactttggagaatgggcttggaaatggcagagataagaattataagttatttataattagcttaataatttcggtattcttatctgcagccatacagagttatgtgagttgtgaactgggataggacattaaagctgacagggttacatctggatcagaaacaagacaaaaaagatatgcctcttcatgagcctcatcaatgccccagcatatattgttattgctagcacaacattagggttttgtctaaattttacttatggttttagtgtattttaaaatatttaaacaataaattttattttacataatctcaattcaagatttcatacttatatcttttgttatcagagaatattaattaaaatttaccatgtacatagaagaaatagatatataatatgcctcatttaataatagggctatgttattataacaaagcatctgctctgtctttctctcaacagaccaaattaatctttgccacattattccttggacatttgagaggttaaaatatatgcgcatatacatgtaaaaccaatttgaaaaataaaagttcccaaatgtttattcagtgtctactttgtggcaggcactgacctgagggccgaagaaaaatagggagggtctttcccacaagaaggaagaaaaggaacagatggtgcatgattaccaggttcagtggtttgcatggagtgctcttcaagcactgataaaaagtgtctaaatcagattagatggaacaatgtcagatatggcttttagaggatgtgaatctgacctcaatttgagaatgggtagtagttacctacatagggatgaccatttatgcataaagtacagatacagttaatcccactttttgataatgagggcctggaattctttcatatctaatgaaagaataaacctcctagaaagtccatgcagattgtatggtacacattttaattggtgcctaagaatgactgtagttggagaaaggaaggtgaaaactgaataatattcttgagctgagaatatttctatagccttactttaagcacacatcttaaatccaggctaaaactcttagactggcattggcaattagctatttcatggatataaactaaggagacttgacgttaccaacctgcttggggagtattttgctgagtctatccaactgttatcaattcgagaacaatactttttaatttgaatcaacctgtttttttaaaaaaggttttgttttaactaaattcatctgttctccccacaaaaagccagtttgtttgtacttacatatctctatgtatacatgtatatatttttgagtctgcaatattcttgtcagaataattttgcttccttgaatatttcaactattcaaaaatttactgggttaaaacaacacacacttactatctcacagtttccaagggtcaggagtctaggcatggcctagctggtcctctgcaaggctgcaatctaaggtcactagggttcagttttcatctggaggcaccactggtgatggatcaactcctgaggtcactcatgataatgagagaattaatttccttgcagccgcaagactgacggtcgcaacttcttggtggctgttacttatatcagaggttacgtatcagaggttacattagctcttagaagccatcctcagttcgctactaccttgccctcgccatagaccctttacaacaagcagcctgcttcttcaaatccagcaagagaggaagagagtgagtttgctagtatgactggattttatatagcataagcataagagtgacagggcatcacttttgccacatcttatttgttagaagcaacttaaagttcctgcccatattcaagatgaggaaaatataaacagttgtgaataccaggaggaaagaatcatgagggttaccctgatatctgtctgccacatcccaaaaagaaaatctatttcaggctttggtatcatttgaaaggtttccagataatcaggtagtcaacattaaataattgtttgaatgacatttaactattgcacaaacaggtgcctctttaaaaaaaaaatacacacacatatacacatacacttttttaaagcagagtccaagtgtgccagtaactgacttgagtataaagcttatttttttaatgttatttatctttcaaaccataacagaaaataattttatttcaaatgatggttatatatttttatcattattaaatataatactatttttctccaaatttatcccacaaattttctcttttttgtgtaattgattgtgtatagtataaaactataggtcactagttttagcaactgattgaatttaaactgattatgtgtttggattttctatataagctaattttaattacattaaatgtttatagcagtttgtaaaaagagatgcaatcgtaacattttattctatattattttaataaacaatctatttttatataacaaaatctataaagatattgacaagaatattaggttatattaaatgtttacaaatggtcttttagattaaataagttgcattgaaataatgtgcttcagtctttcaaattcattttaacaatttgttcagcaaatattttattaagcaagtgtcaagtatgtactaaaagcttacaacacaagagcaaccaagtcacatattatttgaagccctaaatattcagggctatgttagaagagtattaatatgaaataatgaataaggacattaaaagtcagagagtttaattgatatattataggttataaatttagggatcctaaaattgggattggagtccaggtcttctgtatcacagtttactggcctttcactacctcttgtagctcttaagtaataagttgccttcatttgtcagagagggtgatcagtgccctgcaaagttcttttcatgaagcagttatagctttgtgttgatccatagactctctggtttgttccccattgagaccagctaagccatgagtcacaagctgatggttagagttcagcttggaaacatgaaacagaatgaggttaatgacacagatcagaatcaagcctgtgactttgttttcattagtatcatgctctacataaatttgctagccagtcgtagatgtcaaagtagaattcaatctatacattagtttttctcttcctcctttgacctccagccgtgtaatgaaagacttcttcaagaaggatggccgggcatggtggctcacacctgtaatcccagcactttgggagcccgaggcagatggatcacttgagaccaatagttcaagaccagcctggccaaaatgatgaaaccccctctctwctaaaaaaaaaaaaaaaaaaaaaaaaaaaaaattagccgggcatggtggtgcacccctgtggtcccagctacttgggaggctgaggcaggaaaattgcttgaacccaggaggtggaggttgcagtgaggtgagattgcaccattgcactccagcctggatggtagagtgagactctgtctcaaaaagaaaaaaaaaaggaatctatgtagttttatagatttgcaaaaaatactatattcccaatgtatgctgtgactcttaaaagtatttactaaatgttgccaatatctagaaccatctcttaaaaaatatttcaaacatatcagtgttaacaattaatggtgaaacaacaatgtgattaaatggtgttttaagtaggttttaaaaccaaattatatgtacattgcattggcttgtcagactctagttattaaatgcatcgattttaccctgggaacactcttatttccctacagtttaccttttaataagtgcagttggcacatgttttgaccagagttattatatgtcttattgttcactgtatgtctgggacttttttttgttttgcatgaacttggcagcaaattcaaaacttttctcacattaataaagctactggttaaaatatgtcaagggcagagtagctcattcttgtaatacggttgtatatacacacacctttgttttgttgttatagaaaatgctaattagtatttcctgatgacatgtgagcttgttgcatagattattttccacttaccttaggtcttggtgtattaggcaggctgcgaagcacagcttgcaggggagggccaccattgtccttttctccttcaaatattatataaaagttcaggaaaaaaagcattctcatagattatattttgtgactgactacccgtattttggggtttgtgtggtgtgatgagtagagattaaataatggaactaacttggttatagatagttctggggactaggagattaaagacaataacagatgtggggaaaaattacttttgtagaaatattcaagagaaattatttcagagaaataaatgtatgtttcatgtttagttcaatgttattttcaaaggattatgtacaagagaacccccactgtattttttccggagtgatgatgttcctgataatttatgtcaccaaaaagaaatgtgttctaaataaatgaaaattacctttagaaaaatacctgatttactcatacttcctattaagagtaagacacgaatatgagagggaaaagtaatacaatcctgacataatgcaatgccttagtccctagtgaggtaaaatatgtgatacatatatgtttaatggacattattgtgaagaatacaagaacaatgacagttatttatattgcaacttagaaaggatacaaatgaatggttttctttctcaaaacaaactgtaaaactaaggcaaaccattttcctttccaaggtctgctgaagctgacagctgccacaaagcttattcccagtgttctccaatatgtagccacaacaagttgttgagtcctcttaaataactaatgtcagttattaatataaactttagagtactcttaattgtgattgcaccatctctttccttggtttctgggaccatttctattcttcttcctatggactcacctttcttcagtgtccttttctgattccttctaatttgtccaattcaatcctcagactgttccattctgccctagytggtcatccattgactgacaattcacaaatctatttctccagcttcagccacaaaagagagttaatatgtccactctaactcagaatctctatagagaaatgtacaaattatactcaaggtagacaaacacaagtacactatgtttttgtactccacttgaagctttaatagattctctccaacttaatctgtcttaaaacaaactctggatttacaacyttcaaacstgctccttccccagaaaccccacttcactcaatagaagcactataatttgggttgctaagaccaaacatcttcaatttcttttcctttctttccttttacacacatacacacacacacwyacayacacacacacacacacacacacacacacacacacccctatcagtaaattataaccaagccttaactatacttccccttctcctacctacttcttccacgccgggccaagccagttatctttcttaattgttgaaatagcttccaatctgctatatgtatctccacacttgccattctaccgtctgttttcaacatggcagccagagtatgatcttcttaaaataaaactcagaccatgtcacacttctcaaaacctgtcaaaggcttccatctcattctgaatcaaagttaaaacctcttcccccaaacacacacacacacacacacacgcacatgcacacacacacacacacacacacacacatacatcttcctggctttgtcttttctgatctctccctcaacttgctccagccacacaggcctcctagttgtcttgccctgccccacagactttgtcctgacaatcctgtctgcctgtaatgcatttacctagcttccctcaggtctctgctcaaaaatcacctcaacagagaggactttcctgaccacatcttgtaaaattgcatacctccctctcccaggctccttacctttcccaggctccttaaccaccccccatctttgtttttctccacagaacttattatcacctgataaaatatgtatattaatattgttgtctattgtctactttaaggatgacagggattttgtaatatttgtgccatagtctagcacctaggacatgtagtagttattcatatgtattaaataaataagttatatgaaatatatcatttaacagctgatttgcacaagtgggagtcaatatgtcaatttcaacttagaatttctgtagagaaatgtacatattctactcaaggtggcccagactattcttaaaccatatttaagaaggtgaaatagagatatgatttgatggtttttattattatatggttttcagtattggatacagcaskgcacaaattatattaaaactacaattaaaaactacaatttcatgccaaaaaaaccctgattttactctgatcatccttcaaggctgttgttcttgattctagcattgatatttcatgtttatttcattacattttatactattttaaaatattaaatatttaaagcatatataagctattttcacagttgatttgcattaagtggaagttaatatgtcaattctaactcagaatttctaagtagaaatatacatattatgcctgaggtagacaaatacaaatatactatatttactataccatgactatttagtatctttaatcccataaaaattaattacctgacttatttccaccaaagctcttctaattaaagttttggaccacagtgaaagaaaataagctttaatttatatgtattaaattttgtatatcttcctttttctctctccaatggaagtcttatgaatgtgtaatttagacatgtttgtctagctctcacatatatgaaaggtgttactgttagcttttctaaacagaacattgtaacaactgccacacctacaaccccattcagccagaagtgcaactccccaagctttgggaattttctactaaaggacttgaaagagtcaatgtttcatagttaagttgggattaaggaaccatcttgaccacagatttctgaatttttttagtatataataatcattggcaattatcttgtccaataccttccatataaaaataagaaaaaatgaaatattcctcatgcccttggaaaattgctggcttagttttcttttccctgtaatggcttaccatctggtcattcaaactgggccagccacttctcaaggctgccacactagcctattgctccttccatgatgttttccccaatgtttgtatttctggttcctccatgtcattcagttctcagcttgaagaacacttgtcagggaggtcttctctggcacccaatctaaagcagccttcagtcacctactagcatatctcttattttatttttcagaataacatgcctcactatttcctttctgaagtgtttgtttttagatttattatgtgttattgttcatcatggtacattaaatacagagggtagcagccttgattgttttgttcaccacagtatccccaatgagtggaacatttcctggcaattagttggtgctcaataattatgtatttaataaatgcatgatgtaatccttgttacttttcatatttgtattagtgactaaaaaccatgagggggcctaagaatgtacaacccaacaaatacagactttccaccagccacatcatgggccatttaaaaaaacacaaaattaactgatctaattgtcgtaagtcttcagagttatatgcccagttgtttttgacattgccagactactctttgataaacctgtcaatacaattaatttgttgataatatgcatatctcatcaccaagtgcagtcttactttcctgcatctgaaagaagaaagacaagaatgctttctgcttcctcttgacattttccttcccgggaaatattttcctcaagtatttaaggtgagttacattaaaatatwgaaaaattagcttaaatcttttcttatcagaaaaataagctgatcatattcattcaacaaatgatttctgagcacctactatatatcaggctcttctgtcattgggattggtttctaatggaaggagcagataacaaacaaataactagacggcaacattcacgtgttattatatccttaccacagtcctttgatgtaggaattatcattcagactcacactgccagctgcagagttgggatttgaacataaatttctattagtttaaagcctcctccctttgtactttattgtttggaaaaagaatattctatgaaaatttaaataataataacaaaactgtgagtcttatagggctttaaaatcattataatttatacaaaaaataaattatccatttaaacagagaaattattcctatgttttggtcatagaaactaagtgcattatacattaccataatacattactttaaacatctaaaaaatgaattatagtataaattagacctcatcaaaagatcattcagttacatagtttatcagttattgtccaaagtgttctcagtaagacagctctaattgctttaaagtgtttaatatggcagacattagattctggtaggtggataagccaatctttaagtcaaccgatgctcctgtaactgcccagtgggttcattttgcctcctgcccagacagagccaatttatcaaaacaaacgaattgcaatagaaaaagtttaattcacgcagagcctgctgaacaggagaccagagtcttattattactcaaatcagtctctctgaaaattcagagactggggttttttaaggataatttggtagataggatgccagggagtgctgattggttcggtgggagatgaaatcatagggagttgaagctgtccacttgagctgagttggttcctgggtgagggacacaagaccagatgagccagtttatcaatctgggtggtgccagctgatccttcgagttcagggtccaaaaaatatctcaagcaccaatcttaggttttacaatagtgatgttatccctaggagcaactggggatttttagaatcttgtgacctctagatgcatgattcctaaatcgcaatttctaatcttgtggcaaatttgttagtcctacaacagccagtctggtccccaggcaagaaaagagtttgttttgggaaagggctattatcatctttgtttcaaagttaaactataaactaaattcttcccaaagttagtttggcctatgcccaggaatgaataaggacagcttggaggttaaaagcaagatggaatctgttaggtcatatctctttctctgtcataattttttcactgttataacttttacaaagacagttttactcctatgataatccttcagttagttcactgtctagttcctgggagtctgttttgtggatcctaaccctaccccaaggattctactgcattgtaaattctgactttacatttaagacatggagttctttgggggcagggagataaatatcctattttaactatcaagggttaaagtgctttcaaggatctagtgtctggtggtgataccagagtcatacaattcaaattacaagcatctgtttgttgtgttgagagcagggactgataaatgaggcactttttgattgtgcaactgggtataaaacagtcaaaatgatgcttataacttcaagcttttctcccacttgaatcagccaacaagattttcatacaacatttagaccagagtagctgatgcttctgtttcttgcattttgtctggtttgggatcaattttgtagtcatggatgtagttatagctctttggtatgtgaacatgagagaggtgtaagctcataaaataagaaaatctgtttttgttaaagtagacgatgtgcaattcagaaacaatgaaccatatcaactaaataatgggttaaatcagtagagactttgtcaatcttgtattgatttaatcatttcaaaattatttattcattgtctataggtatgctaggagaatagttgaatacaaaaaatgttcttacactcaggaacttcacaatcaggtgcaaaaatgagacaggcatactcacattaaaaattaaatgacaattcaagaggcggcacaggcagtctaggataaactgccatatgaataatagcaacaataaagtagatgagctcccaaaaaggaaagatcgaggaaggcagcatggaaaaatttgacattgccttgtgtttggagttgaacgagttggaagtgaataagtagaggtttttccacgttgcagagaagtacgatggtggggggtatatatggggcattcaaaatgcatgaaactaggaattcgtttgtcatctttaggaaatttcagaagtagtttctgaccattttatgtgggtcctttattttcaagtttagacattgggattttatcctgagaataatggggaaccattgaaggttttctacaggggacaaggatagcatgttggaatgactaaccagatagaaatatgcacaatttcttgaaaatagggagaacgagaaaggaagaaagcagaacagtggttcttgactttaatgtgccacctaagggcmaggtgcagtgggtcacaccsgtaatcccagcactttgggaggccgaggtgggtggattgcttgagtccaggtgtttgagacaaggctgagcaacatggtaaaactccatgtctacaaaaaaatacaaaagtggtggtgtgtgcctgtaatcccgctgctcgggatgctgaagtgggaggatcgattgaggccacaacattgaagctgcagtgagccatgattgcgccagggcactccagcctgggtaacagagcaagacccctttgtctcaaaagaaaaaaaaaatccacctaaggagcttgttaaaattgccgattcctgaaccttactccagagattctggttcagcaagtctggagaggacgcataatctccctgttaagggttagattctaaataagtggtcttcaggccacattttgaataatactaaattagaaggctgtcacaataatctaggagtgaaatggtgaaggtttgtattataattttggaagcagggatgaaaagaaagtgatggttggtagagatatagtgaaggaagaattgataagacctagaaatgtttgggtataagaaatcaaagggaagaaatagttttaaatgatattaatgtatttatcatatttgatatttttgttaatgtaactggatttgcaagtcacttaacttactttaaaaagccagtgcaaatwaaaataatgtacaaattgtaaaccaaggttgaaaatataagatcaaatgatgggtatgggaatatctgtaaataggaaagaaattcataaaaaattaagctaccactttgtgttatttccaagtgtattctaataattagttttccccatcatggatttaattaattcttagtcaagatttctggatttctttaatcattaccttttgaaagtagatgtagaattctcaattatctaaatcttccacatttagctgagagaccaactctagggaatatattagagtattttcatagttccatcagactatgaaccccaattcttagttaaggcactatagctatgggaattatagtccatagtgaataaaatatacaatcatggaccttattttgaatagcttccagaacaaacatatgcgaacatcttgaggaggttattatggctaggttctagcttgcatcactaagtcatcaagaatgggagacaaaaggtataaggaaaagttttcagtagaaattataataattgtcagaggaattatttcagtctcaggttgatgcaaatttgggtacagtggatgctgcttccacttgttttcggaagccgtaaccaataatcaaaagcaagcaacttttccaaaagtaattccatcttgttttttaaaaaaaagtttgagtttatttaatatcttcatttagacatgtgaacaaattgtttgcctttttcattaatgacatctgagtacttgtgtagattgccttcatagttcatttgaggcataatgcctcaaattaggaactggaaatgtttctttttaaacatgaatattgcctaaaattgctgaaattaccaagtctttaatttcatcaacagaagaaaataggcaaagaaattcaggcaaattgaagagttaaaacgttatgtataggtcaggttcagttcagtgcaaataactgtaatattcctttatgttttaaagggatgtttggtttgagagggaatgctttcaccttctgaaagggaagagggaggtcaaatagtgacaaaagaatgaggacttgggggaagtttcagctaagaggacaagcaaaagaaggctgagaacaaacagcaatttgtggtgggcatgtttgggagctgtaaagagaatagctcttgctttggagtaaacttcctcagtcagaactaggtccttgaattcagaccagctctcatctccttggtccactctagggctgatggaggctgctgaaatcatcttttgctacattaatactcatttttcgctcaaagatgacaaggagtatttaaacgcagagagaatgttatttataaatgatgatttgttcgtgatagaacttgccacatagtattttctcttttttaacttttattttaggttcaggggtacatgtgcaggtttgttatataggtaagctagtgtgatggaggtttgttgtaacaggttattttatttcatcacccaggtactacgcctagtacccgataattattttttcttttcctccccctcctcccatcttccaccatcaagtagatagaccctagtgtctattgtttctttctttgtgtccacgagttctcttaatttagctcccacttataaatgagaacatttactaaatggatctttataaaaacagtttgccgaccactaatgaataagaaaatattagaataaaaaagctcaatgtcactgatcattagagaaatgcaaatcaaaaccacaatgagataccatcttactccagtcagaatggctgtgattaaaaagtcaaaaaaataacagctgctggcaagatttaggagaaaagggaccagtattcggttttctgttcctgcgttagtttgctaaggataatgtcctccaactccatccgtgttcccgccagtgacattatctcattctttttatggctgtgtagtattctgtggagtatatgtaccacattttctttaccaaatctgtcattgacaggcatttaggttaattccatctctttgctattgtgaacagtgctgcaaggaacattcacgtgcatgtgtttttatggtagaacaatttatattcctttgggtatatacccagttgtgggtttgctaggttgaatggtagttctgtttttagctctttgagaaaccatcacactgcttcctacaatggttgaactaatttacactcccatcaacagtgtataaatggtcccttttctcctccattctgactggaataagatggtatctcattgtgattttgatttgcatttctctaatgatcagtgatattgagcttttttattctaatattttcttattcattagtggtcagcaaactgtttttataaagattcgtttagtaaatattttagactttgtgagatatacagtctctgtcatactcaactctgccactgaagtatgagagcaatcattgacatttactcatgtaattacatgggtttggctatgttccaataaaactttatttacaaaaacagatagcgagctgaatttgtctaatagccacagtttgcctgaccctgtttcattgcagtatgtgctatttctattgtgaatgaaaaggctagcttagaaggctaactactttttctggcttaggaagctaactactttctctagcatagtttcctagagaaataggttctcgattaaaaatagataggaacctgacccacactgtatctggcaaattctttaactaaagaaatgtaaaacgctttggaggtacctaaatagtggctaaaaattgagttccagtgttttctaattatgagatgaggacacattttcctcatctgtaaattaggaataacaataccttcttcataaaaaggccatggctatcaaatgccatcgcataagtgaagtgcccactgcagcagcatctgacatagtaggccctccagtaaacatctgttttctcccttctccattgccaggaaacacatatggaatagaaataaaagtagaaacaaaggagagaagaaggcagaactagtttcagttttaaaatacagaagctctttatctcactaaaatattcattgccggcttaaaggcaaagccctattactagttcaacacagttcataattttcaaaagcactacccctgtcatggtactgtgggagttcttggttttttactcccctaatttcctaaattatatgtataacatcatatatggaatataataatgtatatatgcgtgtatacttaggtatacatgcattatttatgtaacagatattgtgctgagcattttacatctattatctcatataatctttacagtaacattgcaaagttgattctgttattttcatcgatgaaaaaactgacagagaggttaatgtaacccatctgtggttacacatctagaaagtcttggagctgaaacggaaactcagggcgttctggctgtaatgcccattctcttaataaccatgataaatgacatacttttaagaatgaataatatttaactgtgatgagactactgatttggtttagattcatcatttctaagttacttgaccaacatcaaagaagaactgggtcaattagtccaatctgtggtttataattggccaattagtccacatctttgaatctgcacagggaccacttgcacataaatctagatctacatttgccacgctccacaaagcattctgaacaattcactgtgttcaaaaatgagatttctattatttatgcatgaagaaaatatgctgttttccatgcactgagccagggggaaaactactcagccttggtaatattagaccatggatcttccatttattttaaatgatagtgtcatgctgaggaaaataatggttcatatccttcttctccttcctccaaatactatgtcaaaactactttgattaaaataaataaaatcttgtatcactgtgccaactctgtaagaagacagagcaagcaagcaaacacattaaaaactaaggtgttggagagtctgccgtgacttgtgaattctgtatattttttcctttcctgaagttcttattttcttttcttttacttaccaagttacttggaaatttaacaatttaataaaaataaacagcatcttttcccaatatttaaaaaaatgtattattcattaaaaattttgcattcacaaaaaagtgaataattgggctccaatctgagttagtttatgagtgttccccaggtacctatcctctctcttttggagagaacatgtattccttgaggacagattaagaaactagtcttcccttaatgctgggagcctctttgaagtcttatttacttcagatcttaagggagaattgtggtacgctgaaaagtatcacatttgttatcacttgaggaaacaccatttgatctaatgagctagactttttcatctttcaattcatgacagctatagctacattagaaattgcattttggaggtcttggataattatctaaaaatattcacaaaccccttggaggctaatgaatttaaacttggatggctaatcctaaaatggctttattccagcaaagtgggagagaaactccccttcttctgtttatttaaggtttctagtttggggtcctggttctagtttggagtcctggagttcctttcaatgtgtttccataatagcctgattcagaggagtcggggagaaagaaagaaacaaaaagaaaatgccttgtttattttatttacatatatacatacatatctatacatatgtaaaatgcacatggtaaagcatagtattttgcacaaaatcttaagtaaagacagacttgggtttagatttataataggatttagtaatactaataccaataacagcagcagcaaattcttgagtgcatgaaatggattactttatgtaatttctgcaaagtcctatcatgtatattttgtcactagtttattttacagatgaggaaactaaggctcagcaaagctgtaaaacttggccaaaaagtcatgcaatttttgaggattctgatttgctctgtctggtgcttatacccatcttcttaaatagaacaatcatgaggaaattgacaatgtccacagacataagacacgcttgcagagaactaggtattgggacactgcagagaggcaggcagggaacactggcctgaagtatgagctttgaaactggcagtcttcattgtaatcctggctttgcccttgctgtctgtgtgtccttggatgagttaccatcttctgtgtgcttcagtttctttatctgtacaatcgggatagtaataaactaatttttgaaaaccagctaaaataatgcctggttcatagtaaacccaataagtagtagttgtcaatttattaggttggtgcaaaagtaattgcagttttttttctattactttcaatcacaaaaatcgcaattacctttacaacaagctaataggtatcctgcctgctctgtcttatccctttcaccctttagagcagctaaacattagacgagtgcctcatccagagatttattgcaatattttatacatcagaacagtttgaagaacctgagataatattgagaagatagagaatttttctctgtcactccccatcttctattttaaactagtaattctcctctcttgcctgcaaaccccgcttcctaatccttaggcaactgtcctgagttcttgttagttattactaattcctgctgtgatgttcgttgatagctacaatgttagatgataaggaatattatattttaaagtcagatatttgagaaataaaattgcattctcactccaagaaaagtttctgcatatccaaaggatgtgggggatagatatttaggaatatatgtgtgccaggattgggcaactcgcagccaaagaatggaacaggtttaccttggatttgagagctacacacaccacttcacaaaaatttttatcttaatttggtattaactttatttaactataaaactttaaaactaaactttgagaggaggatgaattttgttttaaagatgtttgtagttatttttagctcagagttctatttaggttccccaaattttgtgctacaacagttttaaaagtctgcccagttatttaatctggggagattacaaatacagtgttgacgactggcctgcagctctctcttctgaaatgagatattcaactccacatggcttactgcctcttcctatcccacttagtttccatctcttctgctggtgatgatgtgagttccctaccctgtggggttacaattgcccttatggtttttcttatacaatattcagcattataacatatgtaggttatagagcatataatatatgaactgcaatattatcaatatgttgtatctacctgtgggctccttccttctctcagttaccatattttccttcaccactcactgggtaacaaccatctgaaatttcatgaattgcataacctttccatttttaatacttttaaaaaatcatatatgtatgtatcctctaaaatcttgctatgtaagtatggtccacagatctatgcatgaacattgcctgggagcttattagaaatactgaatttcagcattgccccagacctactgaaccaaaataagtattttaacaagaattgctgttgatttacaggcacattagtttaagaagcactacaccaaaatatattattttgtcttcctaggggttgttttgtttgcttgttttcttatttgtttcttgtttttgagtgttataagaatgacattctgtttgttgtcttctgctacttgctttgtttgctcaacagggcattttaagattcatccaggttgctttctgtagttgttcatggcttcctgatgtaacatttgtgctaatagtccttcctgctaaacacttagtttgtttctagcttgtgttatagtgtataatcctgctatgaacagtctggtgcatgtctccgtgtgtgtgtgtgtgtgtgtgtgtgtgtgtgtgtgtgtgtgtgtgtgtgtgtgtgtgtgtttgcatgtaagacattttctgtgctgtgtacccaggagtagaattatgaattgtagtgtatgtgaatgtttacctttaccagataatggtaaattgttttaccaccagcagtatatgagttttcattgatctacatcttttcaaatacatggtgtcatcaggctttttactttttgctgacctagtggacataaaatgtcctctcactgtggtctttatttgcatctccctgataactaatgagattggtcaattttttcatctatttaattaccattctgttttccttttctgtgacgtgccttttcatgtattttgactatttttccatttttctctcattgattcataggagtacttattttgaaatagtcctttgagagttacatgggttgctatgttttcttccaatttatgacttatcctctcactttcttgatcactcttgaatagaagttccaaatgttagtatagtttatcagtctttcgctgtaactgcttttgtatcttttaaaaaaatccttccttgcatgaatactataatactattctaataatttcagtggatgggtggtttaatacataattagagctctaggatgatattaactgaaatattaaaccagtcttcaactggtattcttaaataactcatcaattggcattttactttcaaaaggcctatgtttaatttctcccatttgtcatccaggcaagatcacaagttttggacttagcttgacgaggctcaaatccaggctttgaaacagcaagtatctgaccttagttaagtaattgtccccataagcttcagtttcctcatatgtaaaatagttgctgctacaattcttctattttaagaaatccgttaattacaatagttgagtcaatttaatgggagctttttaaaatgagaactattagtttaaatttacattttcttaagtgatttaaaaatgcatacattttgccttaccaatgcctacctaccacattacttttcatcatctcaaactataagattaaatcttttctacattaagaatctaaagatctttatacagttttagcctttggtagttgggcctaatttcaaagtgacaagctctttcatgatctcttttacatttttgagatcaagagtgacatttcaaggcatattgattcatttttataaaaaatataattatcaaccacaaaaagttaaacatctctwaaaagttagctaagagcttgtgacagatggacatttagcaactgagtaatcattcttcaggtctcacaaatctgtcactttgaaagttctatgacatcttctgagggatttggtaatatctactcattttaactgtattgctgctgtgtgactggccatgattttatagacatttcaatgctaaagcaatatgcagcttccaatatcattcttatgaatatcttgttgcttttcaataagatatggaagtgcagtttttctcccaggaagaaatattttttcacttatagtaaatctttgtctcctacccatgttttaattttcttcctatatacaaaataacttagctcttcaatgaggtattaataattatagtatgaacttttgaagacattttaagtaaatagtgtatatatatatatgtgtgtgtgtgtgtgtgtgtgtgtgtgtatatatatatattttttttttttgatatggagtcttgctctattgcctgggttagagtgcagtggtgtgatcatggctcactgcaacattcacctcccgggttcaagcaattttcctgcctcaggctccagagaggctggggttacagttgtgcattaccacacctggctagtttttgtatttttagtagagacagggtttcaccatgttggccaggctggtcttgaactcctgacatcaagtgatccgcccaccttggcctacaaagtgctgggattacaggcatgagccactgcacccagccaaatagtcttaatttagttaagtgcaaagttcatcaatctgtagctatatgaatgcaagtcagaaatccaaagtccttaccatgaccagcatggacttccttgatctgtcatttccaaacagctttcacctgacttcatcccaggccactggttgatttactattcctcagccataacaagctggctgccatgtctttgcacttgattttcccacagcctggagtgctggcttactcccttgcttccttcaggccactctaccattactcttttggataagcctaacttgccagccaatgcaaaatagcactcccaaacatcacactccaacttcttaatttgcttcagtttgcttcataacactgagctcctgtatctgatattattatttatatttctctaattaaaagaaatggaataaacacttaagcatctatatatatatatttaccacttaagcatatatatatatatatttaccacttaagcatgcatatgtatatataaatacatatatatatatgtgcttaggtgtttattctgtcttttttaattagaagaggagggccagaacttttctttattgacttttttatctccagaacttagggttggcacatattaagtgctcaataaatattggttaaatggctgaattaatgttgagacaatcaggtgaacaggtgttttctatgtagagttaagagtccaacgggctattctcaacattggcagaggactagcacagttctttagtccccactgaaagactcatcctgatcattataatgttaaaatgtgatgaaaaaagcatactgttgcaagaattaaataaaataatgtatggaaaatgtttgccagaatcagaatatcaaatgttaattgttcaataaatgcaataaaattaattccatctgaatcaatccttaccccttcctttcctgtaacagtggaaatgttggcttttttctagtttgggcaaatgcttccatctgtgccctgcagttcaacgcccctcaaccccatcttctcagggacaacatattgttattttccttccttctgtcatatctgttatttctccctctctttgcatcctactcatcaactttaaaacctgctccactcagaagggggtccttttgataatgtatacaaagtcactacattgcctttaggggacactgaataagaagtaattctttatcaggcttctgcttattgctcagctgtccttgcaggtttatagacttatttgccattttctgaatgtccaatgccccacaatatctctcatctctaagttattgtctgcgccagtctctgcccaaaatgcctttactccttcatctccccaagacgtacacacattcatggtcacacatatgtattcacacatactgaaaatagctaatttcaatgtgtacttgaggtcttggcctcagattagatgccactctccctttggtgaggactcactgagctgtaagggttgaatgttcttccagcagacactacatatccgcatcagtatatctcttccccccatcttcccaaattatagttgcttatttatttatttcctctgcaagacacaaaactccttgaggatagtaattttttgtgcatgtttgtcaatgcagtatcacagtcgtcctgagaattagcacacagtagataagcaatatttttaccttgagctgacaagtggaatggtatcattagaaagttacaaaattgattttgtgatactgagcctccaactagttggaaattagtgtgctgctaaatttgcattagtgtgctagtcaaagacaaggatattcaagtacagcatttcttagtttcatattaattgcatatttctgtttatttcatattagacaaaaattactgaaaagcagcctaatatactgcgttggaaacaatatgatagagactttaatactagtacttgtactgrcaatactgacaatattatcttgtatatgtataggtttttacaaatttaaaagcctttcatatatctcaaggaaatatcctaagaacctgtttctactcaacattaaagacctaagtgaaatctgagactttcaatgcctttggatatgtaattagacaggagtttagccttttgtaacacatatgatgatgaaaatttccgattttaagctgactgttgggcatcaagatgaccatctttacaaatgaagtagcactcatgcgctcaagtatacatagaatgtatgcaaagtgaaagtctcctttaaatcttcctcccattgacttgagcaacgagaacacgtggacacagggaggggaacattacacactggggcctgtcggggggtgggakgctggaggagggatagcattaggagaaatacctaatgtaaatgacaagttaatgggtgcagcaaaccaacatggtacatgtatacctatgtaacaaacctgcacattgagcacatggaccccataacttaaagtataataaaaaaagtaaaaaaaaaaatcctcctcccattgccaagatagaaatggacccttagttactgccacttgccatctcactctgtgttctggatagaaatggtgcttgctctctgctagctgttaattgacatcacttctgccagaactctccatcattattgacaagaatgttctcccttgttaattgcccagcagcacattgagtgattgattgtatcttttggacagatttgaaatgcatttgcagaaaagggtgggggtggtaatgacataatgcatggtaatgacaccaactaactgcttatttaagtttgttcaggaaaaagatactgatcatttacctgatttttactttttatatagatgtgctaatggtaagtagtgatagctttccaggatgtcccacattaacccaatgcttcacaaaaatctctctcagactgtgcccataaaactccaaaatctatggtcaactagtgggaaaaagaatggataatttatttaacatataagcagggaaaaccaatgggtagatggaatattttacatttttgttgttttaattaaaagtaggaaatacctagattaatgagaagagtttttaaatggaaggctgggagtgctcaatattcagcagtataagattttcttttagcatagaggcaactagagtaatacataaagtgcatattttcatgagaactttgcttataagctggacttccctagaagtatttgagacacaagggcgagtcaactaatagtatctacagtgtttttgcaaccatttaatgagagagtaagtctggatcagtagttgctgatgtatgaaatcacatgaagagttttttaaaatgccgatgccttgatcctcccctagaaatactgattttatttgtctaggcagggtagtgatgatcaaactttacactgaagcagcatcttctcacaaatttggtaaaagtataaagcctcaagccctatcctgcttcatggagcctgggtctttgtgtgctggattagctctcctggtgattctgataacatcaaagtttggaatcactgctctaggttcaacatcagacattttttttcaagctcccccaggtgatattccctaggtacagccaagactgggaactgctgattaacatgatatttaggatacttcccagcctggcaggaataataaaaattgctacctttattaaacattcattgcatataaggcattgtgctaagtattatttcattaaataattgcaaaattctgtgaagtaggtaatattagtactactttgcatatgggagacagggatggtaaataatttagctaaagtaacatgggtaggaagtggtagattggaactcaagctgtaacctcaaagatcacacaagaaactattactatcaataacattttggaattataagttaaattaaaaactctacaagttggaaacatattaaatgattttcttacattttaaaatgttcctgacttgcaattacatagtaaaaacaaaacaaagaatttttaaaaatcagtgggaaatatataaaagataaagttttcatgagtaaaaaggaaggagcaaattggtggtgaaaatcaggttggatttgaattattccaatttaatctggaaaaaaattataagtcacttgtactgttagtrtatgagaaattagaataagagtttcggatagaggtattttgccacagttatattgaggcgaaaggtggcaagcatttcaggggaaagaagaaatttgtgtacttctttaaaatggttttggatgttaataatgcaatgaattaaaagaaaaaggcagtctatactgcagaacacttccatttctctccttttgtgtttgggaaaatactggcttagtgccctcctaggcatggtaaatactttgaccactgccaccagtcacacttgtgtctgcaaaaggggcaaaaagagtgcctttgtaaagtatggtttaatcctacacagtggagagtggtgcttaggagattgccttgtttctcttaagacacaacctttctcagattttgtgtatagtccacatatgagcagagggctcatattaaactgatggaggaaaggtatatttccaaccataaataaataaatagcatgaagagatgatgaaggccttctcctgccacttgcacatttcgtggactgttcttgctgataaacaaagtgagcacttattttcattggcattattttcccagtggcatctagactgtgtggagagtgttgaattttcagcagtctagagagtttgagacatggttcctgattctggtactctagcatccattacatgatatgcttgaaatgtacatatgaaaatatgttaagactgagtgtgtgggaagaatagaataattacacagccaacaagttgttgtgagtcctaaatatattatcgttcaaataatggatggtacgtggtaacttccacaaagaaaaattctagaattattttaacagtaagcaaattgcatttcatctttaagtaatatggtcaaataaaaaaggtacagggaaaaaagtgtctatatattgccctgaaatcctcttggcttctttaaaaaacatttgacactgcaggaaaatgctaattaaaggaagacaaaagttgaatttggattctagtgcctcataggactctaatttctgtgaatattgatacaacatgtttttaaaacactttagtaatagagctgtgttctgctggaagtggcagaaaggcaaattgcaggcaggcactgaagatagagactaccgaagataatcagaggtttgtaattgaaaaggtgccttaaccttaactctggccagcgggctcagccatggctctgcaactaaggacgactcgccttgatttccagcgaggaccactcccgaggccaagttggaggaagatcttcaagaggaaacattgggcattctccctgctgtgggaaagagccacacaatgttttatcctatgtcagggaaagagactgaattaatcttactattggatcttcacccagatccaatttttcagcgacgcgcatagacaatattccaggcaactttgcctggtcacattccttatctttggaagcaccagcatggggctcatcgtcaacaagctctgagaaccagccaggaatcgccaaactccatttctctaagagcactgaggcaagcggaggtgaagaggaaggctccggggcagtggggagcagtgtggaggagggaggcgcgggcacggcgaggggaaggatcaagaggacaggtctgactcctgactggctggagtggttttggtgaaagtcacagctcgggcgtgccagcctggagctgtccaacttttcagcagctccgggatcagggttccggtgccctggaggcggctaccactgccgccgccgccgttgctgctgcttctgcagcccgagttgctgacaatccctgctctcgccgccggcgcccaaaggaagggaagaagaaagggaggaagaaggaccaacctctggcgaaaccgggcaccgcgcaccctagtcttggtgacttggggagcccgggagcgtgtctctgccatagcctcggtggaaggagccctgccgcgttctgtgacccctcccgctggcagggccccctctcggtagccctgaggctctggcgccttcaagtgagaagctaagcaccagcctctgctgggctgcagaagcggcggcggcggcagcagcagcagcagcatcaggaaggcgctcgggccagcgcggtgaacccgggctgggcagcaggtcgcggagccgcgagccaggatggaggcagagggcagcagcgcgccggcccgggcgggcagcggagagggcagcgacagcgccggcggggccacgctcaaagcccccaagcatctctggaggcacgagcagcaccaccagtacccgctccggcagccccagttccgcctcctgcatccccatcaccacctgcccccgccgccgccaccctcgccccagccccagccccagtgtccgctacagccgccgccgccgccccccctgccgccgcccccgccgccgcccggggctgcccgcggccgctacgcctcgagcggggccaccggccgcgtccggcatcgcggctactcggacaccgagcgctacctgtactgtcgcgccatggaccgcacctcctacgcggtggagaccggccaccggcccggcctgaagaaatccaggatgtcctggccctcctcgttccagggactcaggcggtgagtggagagcgccccctcccccattcaggcaaagggtcacctccccttttctcaaatactccatctaagtcggcttatcaccaccaattctagacccagggtaaaatgctagtctggaaattgggggaggacaaacaggggtgtgcctatcctttattgagagtatgctattcaggtgtgtgtaagagaccccccaaaagtactgcataaatgttaactggggccgtgtgtgtgtgtgtgtgtgtgtgtgtgtgtgtgtgtggtgcgcgcgcttcccagttatctgtgccacgcaccagccctctccccacccacttccataccaccctggctagtgagactaaacaggcaaaatcagtttgctctgggtggagaagaagagaaggtgaaggttttgcgggatttgaccagcgaaagcacccagcatctgtccactcaccctattgggaagagggtcggtggggctgctctgactggggaggaggggggagtgagaaagcctggtcccaggattgcagctaaaagcctaagaacaactcgcatttctcttcgtcaggtggagaagtaaattgaatagcaaaaggggagaacacgtgggtgacttggagagtttggagcaaaatgttcagcaatccttgagagagacaagggggtgagggagggagaaggagcgaggacgctgtgggagttacactgtgtcggtgtgtgcgagcttgtgtgtagggagaccgtgtgtgtatcagtcgtccctgcaaaatcccaggaagaaagcgccttgttttagcagcaggcaagacgtagagatttgattatagtgatttcgccttaacgtaagtgctccggaagacagggcagggaagccgcctatcaaccgggagttttagtagaagttgaccgctgcttctccaaggaaatgagtaaaggaccaattacagccattctgaggagtcagctccagattcttaactcaggcgtggaggtggatgtggggcccacgtttggtccctttcctgataacccagggacagctcctttcttccctgtcccaggccttccacgccgtgaatcccctcccccacacaggcacaggaaaaagatttcaggagctgctgatccttggcacatctaatagtaaagtagaggggtcgtcatctaaccttagatgtggacaggcatcgatgtactgcacctccaagccacaagtctgaacaatgggcagttataaattgtaaatcaggtctgggtgtggaaacaggaaaatctagggctgggattgtttgtccaactctgattgacagtaggttggactgatcagaaaatcataatggtgttcaaatgtgtgtttgagttttgtgtgtgtgtgtgtgtgtgtgtgtgtgagcatgtctctctgttgtatacactatgtacaagggaatccagccaaactatcataaccctgatgtgtacacatcatttcagcttgcatatatgctcttagccctttgcctggctcacacccttaggtaccttgttggagatgttcttgtacctgttggatgggaagaataagaattgtaattaataacctcaattcagatcaaagactgcagactttcataaattaatataaaagtttcatttttcagccaagactgctaagaccctttgtttgaagaggtggatgtccttctctctcccctttggttgagcacgacactatgtaggaccccaatgatagaatgaaggcaagcctgatactttgtatatttgacctattaatagaaaaataccgtgtgatgatgagcccttaataaacattaaataagaacaagagttctagcttgatctgtgggctgattgattttgtagagtttcttaattgacttcattttttaataaaatagaatatgcctgagagagtggaagaaagaaaaataagctaattggaatagaggtattgcatcattgatttgaatttattttttgctatgctttctacattgattaattgttctatttgaaatttttagttgaatggttcacaggcaaactaagatgtataatatttatatgtagctgccactgtggctcacctgatatatcattgtcattctatttaaggatccttagacttaaaattctttacaatacttgcatattccccacatgctcacacattgcatgtcatgtttttccttaatagagttgcttttgcaaataaatacatctttaaggaggacatggatattagtttcattctttaaagagaacagcaacaatacttttttattttaaagagaacagcaacaatgcttttaaattatcaaagaaattttacatttatcaacttatttgaatcctacaacaacactgagatgagatggtattatctctatttgatagacaagaatgctgagccccagaagatgcgagcaatttgttcagtatcacatagactgtgagtgctagagctaagactgaaacccaagtctcctgcctcatcaaaggtggtgagcccaccttaaataaatgtgtgcagaacctgggcctgttgacagcatcaagaaatacatgaaaccaacgtgaagtttatatcgactgatactacaggacataaagcctgaatgaactaaaaatgagatatggtttaaatccatttttaacaaaatgacatatatcacaagcttctagaagtaattagagattttaactttagaaactctgggcagtataaactggtgttaatgatcacaacagaggcaaatcagtgtatttgttgactttgtaaaatgcatataaatacttatgaaagagtgttcagataaattaaagctagtgagaacatctaacgtctttttcaataattttctaaaagcaaacaagaaaaggtgtgtgtgtgtgtgtgtgtgtgtgtgtgtgtgtacgtgcgcaccaccatcttaccatcatccaaatggggggtttaaatagtctatcaagttaatgtctctgaaaaagcctcatgggtggatggatgaatgattccctatggattatcaagaaaggtatatcttttataaagctatttctagcatgcactgtagcatttccagatattatcttggctgaaattttgagaatttgtaacagtttgtgaagcaatgggaaagaggaatcttgtttaatgaaaaaatgtatataagcagtaaggagacaacccttagatattttgtggtcaattcttttaagtccatgggaaatttggatatgttaaataaattttttatataaagtgtgtctgtcaaacaaggtagattcatgtcttaatctcaacatgcaagaaatttcaaacaataaaattaccagagaaatgagtctctaagttaccaagagaacaaaatgaaatatgaaaaatgtttaaaacactctttaaaaatgtacatatcagattaatcatttcaaccaatagtcttcaaaatgtgacaactatttaactgaactgataaataattttattgtttctttgactttacacaacaaaatattattttcaataatataatacactaaggttgaaaatacaagcagcatggatgattccttgatattataaaatattctggattatagtgatacaaatatccagaaggggacatttgatttagatactttgtttgattcatttatttttatctatttatatttattgtttttttagagactgggtctcgctctgtcacccaggttggagtacagtggcacaatcatagctcactgtagccttgaacacctgtgctcaagtgatcctcctgcctcagactcccaaagtgctgggattactgtcatgaaccaccatgcctgactcaatttaggtagaaggaaaagagctaaaacctataatcacacaaaatataaattctgcgcatattatatttacttgacattagcttttttttttttttttttttttagacagagtctcgctctgtcacccaggctggagtgtgcagtggcacaatcttggctcactgcaaactccacctcccaggttcaagggattctcctgccttggcctcccaagtagctgggactacgggcacgagccgccacgcctgactaattttttgtatttttagtagagatggagcttcaccatgttggccaagctggtctcaaactcctggcctcaagttatccacccgcctcggcctcccaaagtgctgggatacagacgtaagccaccgtgcttggcaacattagttttttaaatatgttaacatcatatattaaataaagaaaacatattgtaatatttaaataataaaagaaattaggttttcatttttctatgctaggttataaaagctatttctttattgttttattgatttttcaggttattagtgtaattttttcttcattaaaggatgtaacggtaatctaggttcatgatgtaaaatttagatttcacattaccaaaataattaattgaaaaattggccgttcagattgtctacatcagtgaatttgaatttaggaaacagtatctttaaaaaaaagcatattggaaaactgacataaggttgacatctttaaattttaatatgtaaggacactaaggatatttaaatagcaaaaaatgcaaggaaaatgtatattttttacatttcctacatattgtcaacacagtaacacagtattagactttttaattttttcaaaattagtttgaaccttttattcttgatttgccttcaatagaatattgtcttggtaacttcatttaatactttatcagctagtgtgttctaagcctttgattaatcagaaaaacataatgaatccatcacctttttacattttgattctaaaatgatgtaccttctgtgtttcatggaaatgggaggtggtgggcagaggaggtagaagggaaaggataggaacaaatccccaagcagggaatgttcctaagtccttgtcttattctaattggatcatctgggttcagttgcccacatgtggagcagtagcatgaaaataggtaattgaccacatcaacaagacatatttctctaagattatggaatgtcgagaagagaagggactgaggcttaaactaacctagtccaccactgtccatcttttacatttgaagaaacatgtgtcatgaggggttaaattacttaacacaactagtttactgcccaaactataactacaaactatatcctccatatctgctgacaattactttacattttacacattgtggccatcttttaaccatcagtagccccaacttccaggttatagccttgaaccaaaagtttggaaattacatttaaaaaacatttgtgaataagtggaatattcaaatattggcacaagagagatgacttcagaaaacaaacattctttcactttcaatttggatacatttacacacacacacacacacaaacacacacacacacacactgatggcttgctcactgatttctatctctaaactttaatgtgggtttggaggcatgtcttgggaagagttcttaaagatcaaatagaataataatctaaaaagacttagttctgtttatgattttgctaattatttaaatgtctgaagtctatcatggacaaacttatgtccctctcacagcttattatccatctacaggtttaaaaatatgcaatatgtgagtctataacttgaatgctgctagtactggctcataacagcaacgttgctaagggattacaccaaatagcactgtattatatttcaaaagatgtggctatttttatcctgaggaacattttatctacgtttaaaaataagaaaactgatttttcccgaagaataagccactttaccttattgtttaaaacttatcagctaaattggttggaccctatattcacacataccaccattgccccaaacctcaccataccactttggagattgagaactctataaaatttgctttgtcatctaaatgagcatttataattcttgctccgtctcaacgtggggcatcacatccatccagttgtctctggtctgtggcattcttagactcttcctctcccctaactttggatctcaaagaccaccaagatcttttgaatcgtcctcagaaataactcttgtgttttttccttgccacttccctagttccagcacttatcctctattcactaaactatcgcaatagcctctaagtgatctctagctccaacctctcctcattcctgttgttcctttttttttttcaccccaggctaccaatttcaccaccatcttctaaatcttaaggtaatttctctttgccttcaagataaagtctaaatttcttagtttgactcttcagaatgttggcccagtcggtctttcttgcagaaagtctaacttttgtccccttttgtaaaccccatgaaataatcacacttaaattctggccgtggtctgagttctctgtgccttttcacacctctctttcttgctgaggctgcttcttccttctagattgctttccctatgctctgcaacaccccttccttacctgttcagaaaactcatgaatatcttttcaaactcagttcatgttaccctcttgcggatattcctacacaaagaaggaatatttttcttttctttatttttttatttttttatttttattttttatttttatttatcgtccgagctggagtggaatggcgcgatctcggctcactgcaagctccgcctaccgggttcaagcgattctcctgcctcagcctcccgagtagctgggactacaggcgcctgccaccatgtccggctaatttttcgtatttttagtagagacggggtttcactgtgttggccaggctggtctgaaacgcttgacctcgtcatccatctgcctcgatctcccaaagtgggaatatttttcttttctgggctttcccatagctttcgtatattatttgtactctagcagttatcaattgcagtttaattatttgttttatgtgtttcccccattaggtatattaggaccttgcacagtgaatggttttatatagatttttaataagtggtgagcttttaaatgtggaaataataatgaaaccttgtctttttagtttgtgctctctcagacaggatatatttgattttcttaataatctctttgaaacacacagagttagtgattattttacccattttatagatgatggaagggaatattgaatctcagaaaaatagacacatattcatgttcaaagatagaacttggacttgagccaaaaaggtctagtgatcttttttattgtaatgtaatgaaacaagagatactgtgagtataggttggtatgaggagaagcagcctataatttgagttaagattatgaagacagagtgaaattataatattatgaagagaaataacagttttgatctaacttatgaaaaaaaaaacaacatgtaagagtgaaaataactctgatgggataaagccccctttgtaaatttagagaagtgcctctacagagtaaattcttaaccttgggttatgtggctctacaagattcattacatttggaggtaggcacacatttcttagagaatgtttatccaattctcaatgagtcttttatccacaaaatttaaggcactgtgttctaaagctaagttattgactgcttcactaagggaaaaattatgagaacatagtatactaatggagtaagattatcgttggggtggctgaaagtaagcagtttgaaatgggattttagaaaaatgcaacacttcagacagataaggtcagaggcttatttaaaaatgacaatccccagtgggattttaggggattacttgacttaaaatttaatttaaatataaggatagtaaagaacattttgaaaaaataaaaagactgtttttccttataagatagcagaacatatcatataggctattaattcaaacagcatgataataatttagaaataaaccaattattcaaccaactggataaatggtcaagaataaggcccatgcatatattgaaaatttagggtttagtaaaggtagcagtccaaatcagtgagaaaaggataaattatttaatataggataaattgtttaatggtttatggaaataaaaaatgatcattacttcattcatactataataaagagcactggataaaaaagattaaaaactcaagagaaaaacagataaaggccatgaacagaaaattcaaaaaggaagaaaaatgtatgacaaatatacatttgaaaagtttttctacctgacaaacagacaaagaaataaaaactgaaacaatttttcatctatcattttggaaaaagatgaaaaatttaaaagaatttgagatggtatacagacatagccactttcttatgtacattttcagtgaacaatatatcaggaaatcaggaagtataaatcaggaaaacattggtgggtgatcaaataatatatatcaatattttaatgtgcatacttttgtcccattaattctatgtttagaaacttagcctaagaatataattgaataagtgagcaaagaaatactatattgcaatattacatataatagtatacatctggaaaccacccaaatatctttcaggacagaaattgtaaaataaatgatgatatatctgtattgagatctgtatgtattgaaattattgaaatgttattttaaactctacaagttgttatgtggaaaaagcaatttagagaatagatgacagaatatggtatcatctaccagtgtgttttcatgcatgcttatatttacatatatgagattatgtctatgtacatgtgtgcctatagttatgtatgtaggtgtatgtgtggtatgtgtgtgtatatatatatgtgtgtgtgtatttatatctatatacatatatatgtagagtgagagagagacagagacagagacagtactacatatatatgtagagagagagagacaaagacagagagagagaatacatatatattctgtctaagcaggaaaaaccaccaaactgttacaggtgtgtgaagagaggatattttgagaggtctttgattttgttttatgttctcttctcttactcaatttcctttaaaatgagcatgtgttgtttttataataagcaaaaatcatgtattttctccttttgtaaaacaatattttcaacttatttcgtttaatatatttcacttgtatttcacttgtttcttaccccccaaaaaaaagcaaaggattgcgtttcataaaaaaatttagtaaaagataaacatgaggacatcaaagagaagagaaaatggcatgaaaatagtatgaactatgaaagcaaaaattcatttcattaattcctgagtaattgctagaaacgagtcacagactggttctgatcttcctatcaactaatccaaggaagggaacactgttgctttaagattcatatatcggtaagttaaaaaatgagttgcttggtaaaatatattgctattaactctgagagttaaaagaaatatttctctgtggtgttttataaaaaagatgctatgtgatatggtgtgtgcagtttcaacattttttctatacttcataaagtttgaaatagatataaatgtttcttataactgtgactgattcttataaaactacacattgatggcctgttgtctaagttccattcattgaaaatctatcagcactggagccccagttagcattcttaacagggcattctctttaagactgaacactaagtgtgcaccattaaaagaagctgcattcttcaacttggaaaattcttctagactcactctcctgtatcccacgttcagcctcttgttctcacctgaatacccgaatttgatttggatgctgtatgtgttctctggtccttaagattaaaaactaaggtcttattttagtttcttgctcaaatattgcttttttgacctgctctgttcctgtaactgtagccctcaagcaagcccaacctaattctcaagtgtggctcagaattctgggacaccagcccaaattgggtcttccttatttgtgatagaatggaaccaaaggaataagagaggctgggcatcttggctcacgcctgtaatcccaacactttgggaggccaagacgggcagatcacttgaggccaggaattcaagattagcctggccaacatggcgaaaccctgtctctaccaaaaaatacaaaatttatccaggcatggtgacacatgcctgtaatcccagctactcaagaggctgagacacgagaattgcttgaccctgggaggcagagattgcagtgagccaagatcgcgccactgaactccatcatgagcaacagagtgatcctctggtattttttcttaaaaaaaaaaaaaaaaagaaggaaaggagaattcagtgttggtatccagctttctgattttctgacatgaacaccccattgtctcgatatttataacatatccacttccagttgaatgcaccaagataatctagttgcaaaatgtagccccattaaatacatggattgacacatttaaatataagccagttaaatgttagaagttacttaccaaaaatgaggttgatgttttagaataatttactcacagcccttctctctgaaagcaattagagtaatacatttttagtctatcgagattgtccaaattcatgataacaatattacctagtatgcaggtgtgcttccagctcacttggaagcatttttaaatcattaaaatataaagtaaaagtttggactcttctatacacacatttttattttactaccactcaatcattcccaccacctgggttttcagttttattgaggaccagtttcttgtctaatgatcagtaggcaggggtctctactgtccagaaatcatgtggttactcatcacggcagctgctactacagacactgaagaaagatcatccaacatggataaataccctgttcttatcagatgtttgagaagtaatagagtataatgatgcccctcatgtagaatatggttctaagaaacccatacttatattaactcagaaactgccataaatagctgaaatatccaaataaatcaacagacccacagtttgtgagaaacagaaggatgttcatggcttcaatgggataggccaaactttgtgttgaattatgtgcttctttatgtcttgtttcctctgcctgaaatgccttttcctccacacccattagtgttttataacacctactcatacttcagatcttgattcaagcatcacttcttttggtgaagtattttcagatctcccaaacctgtcataataccatatagtgctcctttatattgtttattatattttcaattacatgtttaattgtataattattgataaggccaatttctttcaccaaactataaactcctatgaaaataatgactctgtcaatttttctcacattcaaacacagtatttgtacattgcttgaactgaaagaattattaataaataattgaactccagggttaccaattttatgaagttaggaatatactgttaaaagtaagtagaaaacaactccaaattcagacaacctttaccatgtgctttattttattaaagagttaaaaaataactatacaatttattttatgtaaaagacacttcagtttacaaatgcaaatatcacctctggaaataaacctaaaggacaggaagtcattgaagaagtggcaccatggattgccaggatgatgatgttgcaggagagttatatttaaggagacggcaaataaaaaaatgataataaggacattagatactaatttcaatgttattttgtgttttgtcttatgattattttagtgtttatgcattatttaacatttattaataaattataaatactctggctcaattcattctgttagcttggtttaaacatatataaaatgcccacagctactcctgttattggcatctggtagttctgcatgacattaagacccaaaagtaaaaataaataaatttcttgactgagaaaataattgccaattcaaaatggtctactaaccttaacattcataagaagaagagtatgtatcatcatcctggcaaaatggcacttataatttcataaatgctcctttttaactttatgtattatttttattttgggggtagtaagatgtggaagctgttagatagtcattacttctgttgacatggaatattttataaacatgaaatatttcacaaaaaataaaaaaccagtaataacaggtcacatacacactcaataatctcactatagcaatatttcagaaaaaaatgtatttagggaaaacaatttatgtctgtttgtttttagtggcagtcatgacatgaggaccccagactcaagtgcattgccatttactccctggtagaatgtgatttcatttccaatgagctcaaacataatgattatatgtcttactaattatacaaaacatggtgaagaggtagtgtgctttgtgatgtcacatatcaaaaatgctttcttttaaacatttctatctccttagctaggtttaagagataacaagatgggccactgaagtaactttgtcaagcatgttcaatgtaatatttccccagagattgttttaactgattcgaccaaattagattattgacttgacaataatgaacaagatacccctttgaatttttgtcactacatctttttgtaactcatgaaaaatttcaggccaggcacagtggctcacacctgtaatcgccgtactttaggaggccgaggcgggattattacttgagctcaggatctccagaccagcctggacaacagaccaaaaccctgtctctacaaaaaatacaataattagctgggtgtggtggcgtgcacctctgattggtcccacctactcaggaggctggggtaggaggatcgcttgagcccaggggttcaaggttacagtgagctatgctcctgctgtgctgcgcaatccagcctgggcaaaagagtgagacctgtctcaaagaaaaaaaaaatcagaaatgtttgaacccataaagtagataatgaggacatagtgggagtatgtagaaaagcaataacaggccaggagcagtggctcacgcttgcaatgccagcactttgggaggccaaagctggtggatcacaaggttaggagtttgagaccagcctgaccaacatggtgaaaccctgtctctactaaaaatacaaaaattagctgggcgtggtggtgtgcacctgtaatcccagctactcaggagactgaggcaggagaatcgcttaaacccggggagcggaggttgcagtgggcagagattgcgccactgcactccagcctgggtgacagagcgagactttcgtctcaaaaaacaacaaaaaaacccaaaaacaataacatatagcagtgttggccctcaagcagtctggcagcctttttattgctttggatgccgtttgtgtctaagcatttgctttaaatatttgatgtagttaattaatgagtattttggatcttctattatacaaatctgcctatgaaaaataaatgcaaacaaattacaaatttcaaatgatagaagaccaaacggaaatacaacgataatgtcctcaaatgtgcactagtagtttaacagaatataactgccatctgattattaaacagtagaaattgtttaagtagatagttaaaaactgtagtatctaatggttagtattttccaagacagtagcctaagagagtagttcaatatatacggagttccggctgtggaggatggggctggtaaggaaaagcaagaagaggaaataaggctttgctaaagattccttaacttccctataagatgttacagaggcactgattggttttaagcagggaaattatgtggatagttttgaattttttaaaacttactttggtagggccgggcgcggtggctcacgcctgtaatcccagcactttgggaggccgaggagagcggatcacgaggtcaggagatcgagaccatcctggctaacatggtgaaaccccgtctctactaaaaacacacacaaaattagccgggcgtggtggcaggcacctgtaatcccagctatttgggaggctgaggcaggagaatggcgtgaacccaggaggcggagcttgcagtgagccgagatcgcgtcactgcattccagcctgggcgacagagcgagactctgtctcaaaaaaaaaaaaaaaaaaaaaaaaacttacttcggtagatatgtagaccatggagtgggaagaaattaaaggtgtgatttaggtgtttattgcagtaaaccagatgagaaataaatggtgatagtctgaaactgatgctgtggcagtaaaggatggacatggcagtaaagagatgaatttaagagaggttttttttaaaagtggaaatgatagatcctgtcgactgactgacttaatgctattagataaaataatttttaaattacatgtatttccaaaaagtacaattaatgaatccatggccaggcatggttgctcatacctgtaatctcagcactttgggaggccgaggtgggcgaattgcttgagcccaggagttcaagactagcctgggcaatatagcaacatcccacctgtatttgaaaaaatagtaagtaagtaaataaataaaaatccataagtatttggacacctaaggtaaatttaaaatcttgcagttttgttttcctttgttctttgtaatttttagcttgtttgagtgggggaaagtttgaaatattgggtaaggcaaacatttgaaaaygctcatctgcagaggaaatttgcagtgttgtggatagatcacttgtgtcaatacgtgaagcataacaaatgctttttgattgtgaaagcataggtagatatattgcatttcaggtcaccactaattaattgcattaatttagttaaattggttttctcaactcatctgaaaaagatgaaaactaacacttcaaactacttcctcttggtaacatcataaagacaaatgaactttctttttcagtcatttccctccttcccctgttctgccctctctctctaactaggaagctactacaccagcctttccagctttggttttctaatcttaattatttctgtacccatctatcactggaaattcttcaaacactgatgtgtggatgtgtgtgtgtcgggggttgaggggtgagtttggggagtggtgctgtgtgttattgcaaaattatcctttttttgctttatctttaaaaccttttggaaacttgtctaaacttttctttctcttttttttggcagaatcttgctttgtcactcaggctggagtgcagtggcgcgatcttggctcactgcaacctccttgtcccgggcttagctgatcctcccacctcagcctcccaagtagctaggaccagagttgtgtgccaccaatgcccagctaatttttgtatttttttgtggagatgaagtttccggagatgaggtttcacgtgttgcccaggctgctcttgaactcctgggctcaagctccgcctcccaaagtgctgggattacaggtgtgacccaccatgccctgcaaacttatctaagctttttttttgttcttcttcttttttttttttttttttttaggttctggcatacatgtgctgaatgtgtaggtttgttacatagatatacatgtgccatggtggattgctgcacttatgaacatgtatgtttattgtttaagcttttttatcctttttatcaattgtatgtttttaaaaatctctgccatgtgcttttgcctctggctaattctatctgcatagacaccataataatctgttaatcacacttaacaagcctttgcatttgatatacctcttacaaacaaccaaacgaacatgcaggcaaaacaaaacagcaacaacaataaacacttcatagtctttcttttgcttgtttctctaggatgactattcttaagacccacacctgacaagaataattctttaatttttcattttcttagaatcaaggtattgtgttttcatgtagagttgtaaatatggtataagcaaagatacttgctctcaaaccaggattttatatatattttcatattttgtggttctatgtatgcatttttggctctaaatatttgttttcataataccattaatgtgtaggacaattactatgtatttttgttgttgttgtcctatccttttcctttcccttcatcttagtattaggataagtatgcaacagtaattttccctttctatgagataaaaacttctacatcttcctaagataatattactgagatagccatttatagatcattatttaaaaagactttttcatagtgcattgacatacactatcccaattgttcctcatatagaagagttttaagttgaagagaaacataatcaatgtcctctagaaagattcctcttgtagtagcatagaaggggaataaaaataaagcaagacagaaggtggggggagtccagttgagacattatgataaaaatccagtatagcagatagagtcataacttagagcagtggaataaataggttgatattattaggctaggtttgtccattcttagcaatcaattagaaaaaggcaggtggataaagaataaagagatggaaatcttaaggtatgtactcagccaactgggtgagtgatggtagcacttaccaggtcaggggaggaaagctgaagagtttgctagtgaacacacaaatagaaatgttcagtagattattgtcatcatcatcatcaccatcactatcatcatcattatcatatttcctcagcactatcatttattaatttgtgaggcttggtactcctagaagctttgcacagatcacagttcacttaatcttttcaacagaccgtggaaaatatacccttttctctagatgcagacctggaaaatggaacttagaaaagttatagaatatatatgttgttgttgtccttttaagctcagtgtacatgtgcaggatatgcaggtttgttacataggcaaacatgtgtcatgggggcttgttgtagcgattatttcatcacccaggtattaagcctagcatctattagttatttttcttgatcctctccctcctcccaccctccagcctccaataggccccagtgtgtgccattcccctctatgtgcccatgtgttctcatcatttagctcccacctctaagtgagaacatgtggtatctgtttttctgtttctgtattaatttgctaaggataatggcctccagctccattcatgtccctgcataagacatgatcttgttctttttttatggctaatgctagaatttttatgactccaaagttcaggttctttcaatatatcagattttaggaactcagaagaattgagagaatagtgtggattggttggaagttactaggaaaatatgatgagcatcagaaagaacacctaaataagggatgccagtggggaaaagctcaaggatggaagccagaggtgcaccatttaaagtgcaaggaggaaaagaggagtcagtgatgggacctaaggaggaattctcactctgtgctttttcaagcaggatacagattccttcttttttttttttttttttttttttgagacggaggtctcacttggtcacgaggctggagtgcagtggcgcaatctcggctcactacaacctctgtctcctgggttcaagagattctcctgcctcagcctcccgagtagctgggactacaggcgagtgccatcacgtccagctaatttttgttatttctagtagagatgggatttcaccatgttggccaggatggtatcaatctcttgacctcgtgatccgcccgcctcggcctcccaaagtgctgggattacaggcatgagccaccatgcccagccacagattccttcttgtgttcatttgaaatgtgaactctgaacaaaggacagtttatcttggatagtcttattccatgatttatatatcactaaaagagcagagaatctgtagatattataagtgggatccttaataattaatatatggaaagagaagcttaccagataccaggatttttctgcattgcctggaaaaggaggatatctgcaaacttttgtaccctgtgcacttatcagattggacctcagatgggacctctgccccacagaatttctctttaatgactcattgcttactggtctaagaagaaaaataattatagcctcaggttagaaaaattgaaattgaatcatttcacagtcagattaatgctccattagtcccatctatatgaaagggaggagggagtcaccaagtcaggttggaaattccttgggatgattgaatgtaagggagaaaaactgtgataattgacatagtcaaggcaagaacccagttccgaagcaaatattttctttgtgtgaggaaagggtacagtattgctggttcttttttacatataatattactttgtattctcccaatactttatttttttttaaaatggataagaaatcataaccagtagagagagtaaagaaacacaggtctattttctttaatgaatatcatcactcttgagttataactctattatctacagtcttgttaagtgaaaattgtttcctcaataagaacacttttttatagaagttgaagttctcttctggcacacattagaattctccagtattcatatttcagttttattcatggtgtcaaaaggaattgatgtgataaaatttccaataatgcaatgagaatattcacgtttgtgcaaataccatggagatgttgagaagtagagtgaagggacattatgtgaaaagtaacatctcactggactcaccaactctaaatcttacttttttcttcagagatgaggtctcactctgtcactcaggctggggtgcagtggcatgattatggctcactgctactttgaattccagggctcaaaggatcctactgcctcagcctcctgcgtagggagccatcatactcggccatttttttaaaaaaaaatttttctgtagagacaaggtatcaccatgttacccagactgatcttgaacccctggctcaagcagtcctcccacctcagtctctcacagtgctgagattacaggtgtgagccaccatgcctagcttaaatcttgcttcttatatatgcaattattaacaatagaaagctgttttgtattactagattacttggtttttcaaaatttcaacaactctttttgatttttaagaatattggttagaatggaagtattggcataagtcactagttttcaaaaacatacccagcagagttgaaagcgaatgtaaaacgccatggcctgttgattctatcatcgtatagagtatttttctgcttatgtacttttattgttttggtttagagacatgtatgatttattacaccagtattttaaagcacattctccctcttcatttctgcaatgtactgtgtcgaaccaacttcataggtaaaagttgtaaaatattgctaatttcacatggttcagcctaatagaatctcatgcccttttaagccttggagaaggaaagcctctcatattgtctccttccagattcttggctcaatccaagcttctgcatagttggagtggcaaatcccactcctgcatctggtgagctgtgcagttagcagctctgacacttttctacgctgttcaaacaattacagccccaaaatgtgagtgtggccttaaaaaaggctgattccatgtgactaccagattgcttcaagatctgcccagtcatccccctgactgtgtcatcccttaaaaatctgtgtcatctgggtacagaaaattagaagaatgttctcttgatctctgcttaaattttcagaatttttcctttgaaaccacgaactagagaattggaattagacttaatgacttgactctatgtagtatatatttcttttctccaaacactgttttgtatacatgaggagggacaagaaatgaaggaaggggaaaagtatagcgtttcagccccagaaaggtacctttcacaatgtaaatgcagagtatctggttagacatagccattttgctcacaagcacattcagagatgaagacatgcagtctctaattgtttcgttgtatctaagagggtgaaaatagaggtggcatatgaaaaaaaccttccattttcattgagcgtacccatattctatggcatttcttaccagtcagtaggaattttttttcctactgatcagtactactgaattacccaaaggcaaaaatattccctattgtttctttgttttctaactttgttctctagcttctaggtagatgttaactttttggtatttaaatgtgcacactccctgagaccaaactgcctcagcaagttttacttcaatattaatgggcaagatgaatattgtttgatgtttcactgttagcaaaagggaggagaaagaactagaactaagttcaattgaaccattactatgcagggtctatacagtcatgattattatctcagattccaaattctgttcaccaaaaattatgattatcaaattgttaagatagtaaattttatgtgtatttttaccacaataaaaagttggaaaaaatgatttgactatatccaagtttgcagagttggtaagtagctttttattgcaaaaaacttgctgatttgtgaaagaaccttcatttccaaattaggaataatttcctgcaaggaaagactatgctgtgtgtgtgcctgtgtgctcttgtgtgtgtgtgtgtgtgtgtgtgtgtgtaactcttctgttgtgaatccatcagtggttttgcattgtttacaggataatgctcagaatccataacaaggtcagtaaactcatctatcatttcctaggcatgtctgttatctgatctctagcctttcttctcccatcgtcgccaagtttagttctacttgacttccttcacttccttcccattgacctagggagcacctctaagactgaaagggaagtcgtgggcttggtggagttgaggtggggaatctatgaacagataaatcagatagaagcattgtttggtagaaagaagagctcatgagtggcagtagagattgagttaaagagtgggatgaaaaagaatcaaaaggaagtagtacgatttggtgaccaatttgttagaagggatgaggggcagtaagtagtcagtgatgaccccgaggtttctagctggacctagaattgtccaactagtccaaaaatgaaaaaatttgcctttaactaagatgagtttgacaaaagatgaagtaaatttgagggtgtaggtaatgaaaacaagttggctttttctcccttgatggcaaatttcagtgtgtatggatgtatacatttgtgtatttgtgtgtttgtcaatacccattgatttttcttaggttatattcaaatactgaagttgtactaattaagcaaccgaagtgtatgctttcagcatggtacctttcacacagcaccaaacatcattatattattttctattgtagcataacaaatcacaacaaaattagcatcttaaaacaatacacatttgttactttacagtttccatgggtcaggagactgcacttgacttagctgggttttctgttcagggtctcaaaaggctttaagaaaggtgttggccaggattggggtctcatttgaggttctggctcctttttccatatcaggtggctgttggcagaatcaatttcttaaccactgtaaaattccttgaagcttgtttcttcaaggtcagcaggagaaagaaactctgacttctgacttctaggccattttttggagagctaatcacttgcttagaccagaccaaccctgaataacctttgattaacttaaagtcaactgattaaggatgctaattacatttgaacaatcctttaactttgccatattccactggttaaaagaaaattacagatgttgaccatctgggaggagatagtgtaagggcctgagctattggagatcatcttagaattctgcccaccacaatcgtgttctatgtttatgcaggtatatgtgtgagtgtgtatttatgtgtgtagttaataacttaaaaaatgaattacatgtatcccaaaacaagcggcaactgcacatcccatgccttcttacttggattagtttttcctgaagttactccagggtcctgtcttcccattgttaggtttcctttctgctgtcctggcttcacctttcgtagccaagaaagcactaaatttggctctgaaatgtacatttcagtacaatctccctgtcttggcagcagtggtgaggctttagcaaatcgtttgtgatcccaaatgagcttcagcagtttggagtgaggccatggcccacatgtttgatgccaccagcctgatttttgtaatgaaaactatatcaataaggtaagtagtcccttcttaggcatgcattcttttccaattttatgtagtggtcagtcattcttacagtgatacaaataaatatttatgctttcatgtcttttaagcttttagcaacgttaaaagaaaaggagtctgtaatgaatgaaattgtcccattgaacttattttttcagcttttgaggatatatcgagtgtacttcttaaaactgaacatgtgcatttgttacatttatatatgtttccacatatcactttgtaaaagaattagagagagcttatgaaatagaatttaagttgatttggtatgagcaaaatatattgttggaatgaagcaaaggaaagaaagcataagagccatcatagttaattctgtttaacttgttttaactctatcaaggttgggccaatgtggcaatttattaaataatttgctctcattaatgcaaaagaagaaatgttccttagggaaaaacatgttgtcttgggtacaaaattccagcaatgttttttaccacatgagactttatggaaaattccagataacagaccttgccctaatggtatgtgggcaacaaatccagaagtatctatcatagcattctttcttataacaaattttattagaagccaaggctagaatgttgaagctggactccgggcaggtgattcaaatgccatactattactttcctagcatggacagttctggttattaactcactcttacataaaacttttagaaccaaaggattggagggatgctgacattccttagatatcttaggtaataatcctgaaaattcacttttcctgaagtttttgatagcagatagtaagaaaatttcactttaaaactcactttgaggacctgaaatgttatattccactttgctgattgaggtcaaggactattgtttgaacctcaaacaagcaggtggtgaggttcactttcaactggtaattacgagaaaacgaaccattatgctagatgcaaggccacctcatcttgcatccggtaaacatgccaacaaaaacacaaacaagtgtctgtaatacctttcaacagctccctgttgctctcattataaatatggaaatccttaccatggcattcaggaatctgcatgatctgatgcatgtgtatattgacagcacatcttgtatcattcgtgacatcactctctattatttggctgattttgacctaattcagcacttggaaaccaccatactcactcctgccttggagtttttatgcatactgtttcctctacactgaataatacctccaaaccctaccgtcactgcctattaaccccctacttctcctgtttctcagttcaaatctccctttttctgattatgtgtctctgattctccaaatcttgccagttggccctgttagggactctcagagcttactgtagttttatttcatccatagcagcttatgagatttttttcattaatgtctattagccagatcgtcagctccatgaaggcaggttgcaggcttgtttttctgaccactctatcatcaacccagagcacaataaatgaacataaagtgaattcaataaaaatgtgctgaaaggataaactactgttatttactacattaattacaacttttgttagccccttacaaaagatgctttcttagatgctgcatttcccattctacagaggttgaataatatgactatgatagttttagaggagatgggaaatagtttggtatttcttaaattaaaatatgaatctgttagagctagaattttattttctgaaagataatcttgtttagccagtgtgagaaactacattacacaaagaacattttgctagtattatttcgcaggagaactaaacttggtaaactgtcgttcctagaagattgtttttatcaggcaccgttgccttctttgagctttatgaactcatgttttaggacagttagacattactgatggagttagagaatactagaaagtgaacttcagctaaagaaagtgatcttttttctctaatggcaattcagttgcaaagttctatttttattctaaggggctcatagagggtggtccccaggattctcttaggggtctgtgagaccatacatattttcataataacaccaacatgtcatttgtaattttcactgtacattttctcagcagagttctccagaagctatacaatgtgatgcatattatttcataacagattgaatacggaagcagacatgagaacctagatgtcttccattaggtggcacaaataaaaaacattgtcactcttctcacagttttttggaaaatagttatttttaccgaaaataaatttattatattttttgaaaatgaattagtaaataaatatttataattgtctcagttttaagatggcaaatattccacataaacaagaaatctgtgagtcttcaataatttttaagactataaagagattctgatacccagatatttgagaatcacttctccgagccattttattgacacaattttacttgactttgcaacctgaccgttttagataccttttctttccagtcttttctaaaagatcaattgattaattgggttgactcgatgatacaagcacacgatcttcagtatcaaaagatactcatgaccagtaaacccctctttagttctcaattatccaattccctttcctggaggcaactgctactcttgtatttcctaatggagatcttttatgtgtttactcaaatgctaagacataatatatcatattctgcttcctgcttatcttccctaatgatatagcaaggagattgattcctaactctgcatgcaaatctgccatagtgcttttagcaattgcagtatcgtccatgatctggatgagacataatttcaccagactcctgttggagtctgttggattgtttcccatcctttgtcactacctacagtgtagtgatgactattcttttacttatttgttcatgtaaagtaaatatatctctagaattaatatttggaggtggaattcccaagtcaaaggaaggaaatacatattttttaaaaggattttagtagattgttctgaaaaaaattacaccaaacttaccctcacatgactatttttgctttttctcagtatactttttaatagattgcattataaaattttaatatttaccatttaaataagtgaaagcaatgtctaattgcagttttaattttatttttattaaggaagttaatcttttttttttagctgaagtcgaaaaatatgttcatctctttttcattgaagctcattagtttccaaaaatgtgtcctcatttcatacaaagtatctttgaaccattgccaggtcatagaagtgactcttgaagatcttcttctctgggatcaagggtcacatctcgttctcctggcttcatacccttctctctctacacatctcaattaagtaagcttcctttcttatcctctgaaattataatcatctttaggctcccagatataggtgacctgtgccatctagtctgacttccagtttgcaaattatcttcaaaaagtggaaacagcttttactttctactttataaattcatacgtgctcaggaggacttttattaagattgggacatattgcttagttagtctctagggtggaatcataattaatgaaagaactctgtctgatggaaggcttagtctaacaaatcatcctaaaacttcattagacattgtgtaatccccatggacactgttgaagagacacttgattaggcagatcgtgacaacttcagctttgcccatcatacatcctccagagactcctcaaactcaagacagactttctacaggaaggaatggctgtttctatttcagaatattactgataccagagctttgctgcatcttcatgtactttcctttatttttatttttatttttttacagacaaaatcttgctctgttgcccaggctggagtgcagtggcatcatcatagttcactgtcacctcaaactcctgggctcaagtgatcctcctgccccggccttccggagtgctaggattacaggagtgagccaccacacccagtcttcatgtactttcttatgtaaatttattttgtttgagattttctttgtgatggaataagcaattccttccttaactcatttcccgagacatttttggaatttgcaatatatatgaaaaagcacttattctcagtgatggaaacaccattatttcttttactagaatgtgatcttctggttttaatatttatgtctctgtgccaaggtgaaaatattgtagaaatgaaagtataatgagagagaatccagataataagattttcaataaacaaaaaaagaagtatgtataggagtcctgtctgctgcaaattttaagaatggttttctgtcaacatacagttgtcattgcttactgaaaacttctataaaaaacaagacacaaatgattgagaagatagtagagactgaaactagaactgttgatttaataagctttcttactcatatacttaatccacagtaaattattagcaaattacattttcatagtatttcagaattaaaagatcatagtcagggcttaaaggaatccagttgttttaacagtgctggaggcaaagcgttctagcagcaatcacctgtcagaatgacttaggttggattgtttgcaccacacactttactatagttacatgtctttcatgtccctttgtatctctgactcagtttcctcatcagtggtaatagcagaacttacattttagtgggaggattaaaataatgtacatgaaatcaaatatataagtcagcactcaataaataatagtttgtcatcattattactatagtaaatgaccactatctgaaatgggatataaaaaggaaagtgaaattactaaataaatatgagcgtacaaagacctgacaatttagatacaatatactcactctgtctcaaaatagtgtcttctgaagctttagtcagaatattatggtgacatttctgctagatttgtcattgagttgctgggtttgaggaagaacctaggctacacatttctcttggctctacaaaaggctgtggcagtgggtccctgagtaaaccaccagaagaaacctaaggggcacctctgtttttcagttaatcagttttagctcaactgggatttaatcctgaaaatctaaattacatttacagactttaagttattgtgaatatttacactacatgggagaattaccaaaatatattcgttactcatacagttttcgaaaaacaggtgagacatcttccagttaaattcatcttccttttatgtttaatctattgaagaattctaaacattgttttgcaccaaattgctcccttaagttttaagagccacctagtttgggcatcagatgttctcctttatttctgtaaaaatcttgcaaattcactcccagaaagaaatgtagagaatactaggctatttcacagaaaaggcttgctgccctttcctgataacaaggtagttattattcttggctgagcctgtcccagaaagagtcttaggtgacctggtgtgggaattgctaaatctcaggctactcactgagactgtctgctgctgtgctgggcactgcagtcctccagagcaggcctgtcagcatcctaccgtgctctgagtaggtccactggggaacctggtggagtgacatcatgtatcagcctctagcagcaactcctctctgtagccccatgtctttcctgtggtacaaaggaacaagtgctacagggcatgtctgtaatcgttatcccaagggcacgctccacaggcatctaagggtgaaaggtactgccagtctgttgggtttgttatttccatagagctacacaggaaataacaccaccaaaaataacacattcaaactcagagggcaatcttccctaactattcataggcacacgtcaggcattctatacatatacccagctctttgctaagcatagtgaaatgcccttttacattgcaattaattattagccaacattgaataattattggtgagagggtaaagggcaagtgaaataaaaatagagctggtttatttttaggaagacactattttaatgtgttgattaatcagacaggtgtttaaaagcatttgttagagtcaattcacagaaaatctcttttacatgcaggttacagccaaagaaagaaataatagccaacacatttacgatttcaattgcaaaaattgtcatatttttgaacttgtgtgggtatttgaaaatattagctcctactaggtccagttaaagcttttaattctataaggtttcagactaccagctgaccactgctcagcatcccctggactccaagggtttcatctaagacatctaaggagaatgtctacccgcacatcgcactaatgcccatgactgcactgcttgaaccatgaggttattgaacagaaagcaaatccttttctgaagagcctccaagatgtggatatttcagttaatttcagctccctgccagctcagaagaatgatgctgtgctgtgtgctgttcccatgaatactacacgcagggcactgctcagtgactcagccttccagggagccagtcagggttttgaagctgcatcgtccctttcatccttgaagttcttttggatttcatcaatggcatggagggatatttttaaaacaatggagatttttcaggactggcaaaagggctcccctcgtcacagtgccaaaaccatcacaaacataagttatgttaaaaaaaatcctaaactaaaaatatctggtacttagggaactaaaagacatctcatgtttgctatcatttccatcagagctcaggtcaatggacagagatcaataccaaaacaaacatgcatacttagagcataaattcagataaatgctggagaattaacatgtagatagaagtaccatcatgcctaaaacaaaaactcagtccaatggttgtttcagtgaactgactagccttcatagagaaaagtttattcttttcaaactgaagttaaaagatattcggtgcttcattcgaaattttctatttcatgatttttgaagtagtgatttagaactctttaggactatagaaaatcatttttcttctaaaatgttgtcttagtcctaaattagaaaaaaaaatagtaagaaattaacaaaacaaaaagttaatagtattattcacatatataaataatgggccatcatggtatctgattttgataaaaggaaaatatactctgggattatttttccaaattctggcactctatttatgagtacctagacagacactagagtctcatggaatttagtattagaaatgctactttggagtacatttgatgtcattcaagttaaaaaattaaggaagtagattttcaaaataggtagcataaaatgtaaaattattgaatgttggagcaagaagatcatctaatgccctagcagttcttaatgttgcttgggtcatggatcccttaagaacacgataagagtttaccttcttcctccctagaaaatatactgctttttcttttataattaaaacaataatatgaaagttaatcttagtccagaagtcctaatagcccaagaatagaaatgtcaaattcatctcatatcattagtttgtaattttccgttgcccttttaattccaataacacagaagctgtaaaactgcttgtcatctgactttttatttgtcattacccaattgagcttcttatattacagataaggaaattgaggcacagagatattaagaaacttttccgcaggaaaaaaaatctgctagttattgagctgggattcaaattcaggtagctgattctagtgtgcatgtgctaaccacagcacatactgtggctaaccatgcctacactcatgctcaaaactacgctgtgataggtcttattagcatccccattttacagacgtggagattgaggtgtagagtggttaagtgacctggcaaaggtggcaaaactagcatcacagtcagccagtctggttccagaggtaggaactaaaccaacacactgcccttcacatgcctgtgtgtgagttcgcacacccacacaatacatgaatttgtacatatgtatcttagaggtcagggtaagctgaggatacgcatgacaaatgggattagatatgactttttccttctttctttcttagttttctaattattttgttttaagcaagcattattttggaataaaaattataaatattatttttaaaaagcaaacaggttgataacttaaaatgtgttagctggtgaaacgtccagccttatggagtaggcccctgaggtatagaaatggttttgatggcataggatgtagccttgggaatgtcctggaagagtaggagcggccagttaggcattaacactcaggagtaaggagactgcatttgggatgctcagctgattggagggtggtgttgagtggtcccctgggcagtgagaagagaggccaatagcactggcacaggaggacaagcaagttgttctaagtaaactctcaaatgaactgagagataaaaactctaaatttggactgcttcacaatttgcctaaggctggccctactcaggcctttgccagctgttgttttcttttaagcctctgatctgcaggaaaacagtcctgatttcacaaagctttaacagaatttttataaacgcagatttggggctccatatccacaaagttttccatcctttattttgagaatctgcatatttaacaatgatcctccccaaggaactgcaatgcaaatgtccaaatacagtccttggtaatatgtgttttcacagggtgaagtttttgtccaacactgtgagatgagagctgggggaaaaaaaatgaacattaaccatagaacaggaatgcaaattttctgaaaagtagagcgctactcctctcctctctttttctccatataattgaagagacactcaaattgattgttttcccattgtttcgaatggttgctccatgtaattactgaactgaactggtagtttggggggaataggggaaattcagagaatgttgtgtagaagtagaagtctacctatgtcaatgacctattttagcatttttctctattaactggctaacaattcgcttggaaactcctccagctgaggctttgttaggctttgctgaaaataaattaggtgactcattaaattgttgctggagttaaaaaaaattaggcttattgattcttaaatttctgctaaaaatgttgctaaattaaatataggttattgtctttatcaaaacaaataacccacagcttctgtattgctttatctgtattcaaaagtttgggccgggcgcagtggctcatgcctgtaatcccagcactttgggaggctgaggcgggtggatcaccagaggtcaggagttcgaaaccagcctggccaacatggcgaaactccatctctagtaaaaatacaaaaaaaaaaaaaaaaattatctaggtgtggtgttcgggtgcctgtaatcccagccacttgggaggctgagtcaggagaatcgcttgaacccgggaggcagaggttgcagtgagccaaggtcgtaccattgcactccagcctgggcaacagagcgagactccatctaaaaaaataaaaaataaaaataattaaaaaaaaaaagttcgaacaacaaggttatgttagcatttatcagaaactaatgataatttatgtggtattaagtagggtagtatcttgaatgagaaagaatactgtagtttggattctttggaggaccttcggtttatattttatttgcaattatgtttatgcttattatttctgcttactttgtgactaaaagccagttaaatgtgattctcagatttcattttcagtgtttttattagaatgtggtcttttaggatttaaacctattttcatcttgcaagtatatattttaaaagtgattcatttaaatattctgctcagcaattagcacaaatgttgtcactaaattattacaatagtagctattaacttcaataagtaaaataacagttccctattgtataatatatttagaaaaaaatcacttagtggggtgcatgtatgtggaacaaggtgaagactacctatctcatcacagaattcctcaattaagaagaaagtgctcttaattacatccaatggcatcattttcatgaagataatcaataacaagtgacttatttcagtgtctcaaattttcaagtttatgcatccatctacttcacagcatccatctccatgggccccaggctgattcttgttatccttgctcaacctatccattctcacagtaaaaagccatgagagccattattttttaggaaatgtgacccattatccccaaatcactgggaaaatcaccttactcgacgggtccttatagctatccctaatatcttgttgatttctcctttaacctttttactatgccaatgaaaatggagcaatgtataactcaataaactccaattcaactgtcaaatatccctttcttcccaaattctgtttaagagtctgtgggcctcttccaactacaatccctgcacacccatccttagcattagccattgtacttttagaggaccaatttgtaaacttgatcatatcaatcttgaaatctaggaacaaagaaccaaactgataagctcttatatccacactcaggagctcatcttccctgattaccttgggctccaagtaccactttcatgagtgcctcacttgtgtagaatctcaccatggtacagctcatcacaccattttattatccagcagtggaaatgtaaattcatatccttttaacactcacaaaaggagtcaatttcagtcaatttttaggaaatttggtgaaagtttagttggttattatcctgttcttcaaaaagcacatcattagacatacttttaaaaaaccagagaataatcttaccttataaagacaaatgacacatgttgctatgagtttaggggagggttactaaccttattatcatgtgaactgtttggaattacctttgaaccctctatacatggatttctgtcggaggcctaagaactccttgtcaggagaaggaaatggtagaaatcagatgaatggtgaagtatgaccattagaaaccaccctctatacacctacactgcctatttttacatcaaacatagcgaactgtcctttaggaagcagaaaaggcagagctgaggaaatgagaggcacctctcatgtctttaagaaaacaactaagtggcaatttctggaaaataggttattgtttgtcaggtattagcctgaaattttgcttgaattgtttctccctaggaaatgaaagatgttcacttcttagttgttttggaaaaacaaatacttactaaagattataatggctatcaatttaaacaaacagatgcttttagtgtctttgtgaataacactagtgaatttgcaagaattattgctttaccaacaaagcataaattcccatgttgcttcagtacttgtgcagtgtttgttctggagcctctattcaatatcaaccagcgtatagtagttcctccgtgagagtctcttgtaaaaacttacattcattcttgttattattttatctgagtgaatatttgacaaagaccaaagaaatccccttgagactggtacccattttctctaatttgaaagatattgactaattttgttagatcccaccatgaaggcaaaaggaaaatatattagctatcactgtggcttaaaacaagaaattatttattatttttaacaaatctgaggggcaactggtgtttggttgatctatgttgaacttatggatagttatgtgagtgtcagatagaatcagacatctatgtgagctggcgcatctccattccacattctctctcatctttcttctgggactgatgagcttgcctgggtgtgttcttctcgtggagatggaagaggtggaagaaaacaagcccaacacaaaagcacattttcaagtctctgtcatgacagttactgacatcccgtgaatgagggcaaagacaagcagtggggcaggtcctcccacccttgatgggagggctcagaatgaatacatagatgcaaggagtagggatttggggccagatgatacatcctaccacagagaggtaggatacagggaaattctaggccctccagtccctttgctccaaataatcaccatagttgagacttgaactatgagagcatcaagtaggaatgccaggtgagcttcagctgctgcccaagtgtctaagaacactcattcacctctcagatactcacatacctatgaaatgcaccaatttcatatcatgagccaaagtaaaactcagaatcattgaaatatttgtctttgcatagaaagagtcccatatggaaacaacccagcctacctgcttgacttcctgcctgcctgcatgcctccctactccctccctccctcgctacttccttccttccttccttccttcatctctccttccttccttccattctccctacttcctgactgcctatgtgctttcctccctccccccttccctccccccttccttctttccttccttccttccttcccaccttccttccttctgctctccctcctttcctccatttctccctctctcccttatatttcttcaattcttatcatttgagtatctagttaatgagttctcatttgatgttatagatttttttagctcttcctcacctgtattccttggagtaaattttatgaatcttagaaacagagtctggctgataaatttattggtgcatcaaactcattgagaaatgtcttccagtttcatcttccaaaatgttactagttctaaaggtagtggttgatagttcacacaaaaaaatcaatactgattcagaaataacttgctcatcagggaaataaacctggaaggttttagtcataatttatttataatccctccctatgtgatattcagagatgaaatttgaggtgaaaaaattcaagtattctttttcatatattttgaaaatataagagtctttgatgtattctgggagctagcatcttgaaaagaggaataaaaaatgacttatctggagttaggaaggtgctagtccatcacccataaaccagttaaagagataaaggtgatttatcagaaagtacaacaaaagtgataacaatagaatattattctccataccaagcaagttacaggtatcccctgctctggacaaatgcgtgatgtgtaaacccagattgaccaagggcataagggagatgtagatctgtagctttagcacacatgaccaaggtggtgcacttggtgtaggctctcggctgattgctgactttgcacacttgcggggcatttcatgaatctaaattcgggaataagatttagaagctggcagatgacgaagagattgtttgggcaaccaggactcttgtatgtgacataatcaatgctgaagttagttcatcatcccattccttgtatttccaaatctgtgatgcttagggccttatctagtgccttttaccaagtgggtgggttgtagaaaaaaaaggactaatactcattttctttgaaatataagcttttgaaagaatattttaaaaagaggactaacattttagctttcatgtaaaagtttgaaaaaatgcaatttcagtacttggaaatgagcattttaagactccttgttgacttcccttgtattttaatgcatttctagagagatgtctgcttctgcattgcttccccatgatttacttcagttgaaagttcagccagatccattattttctttctttgacacattatgcaaattaaatgcaaaattcagtgatgagaggaagaggtctcagagcattgagcagatgccgtgtcggtaatagagtaaggcaattacaaaattacttgcagccactgtgactgtgtattttcccgtattctgaaaagaaatctgtcatgtgctcatcactacgagatttatttttccattgatgtgtgggagatttatgcatttaactgtcgtacacattgatgagagaaacatgcacctacagaaataattttttatagattagtgagatatttaattctgactttcttttccactaaaatgatcctttgtaatagtcttctcttcgcctgtattgtaagtatgaacatcagaatggctcagtaagctggaagagcaaaaccatgtctgtgtgtagaattccaatgccaaaagagaaataccacttatcttccacttctataaataaaggcaatagcaaagtcattaacaagagcaaggggtgaattcaatgatctctaagatttttttccagctaaaaatgatatgattcttatctattactaggaaatagtggtattgaagtagaattatgagctctacattcagtctacttttcacatcggattgtcatctcatttttggagggtaattctctttagattctctagtcctaagctgtaatatgtcttatagttgtcatattttagtgaacaaaccagaaaaaaagattgcctgcatcatatgtaatttttgttcaatccaagggcaatatcgtagaatacttgactcatagtttaaaatgatcatttttattgagttcaaattaagtcttctgtagatataataattatgtgaatcaaaaatatgtatttgtgtgaagaaatgctctttcttttcaggcttgccttcaaaaaaagttagtctcatactgaatggcaataatttcttcttcctgcctcctaagaatacattgaggatataaaattatgagactagaatgctcttatttcaaaaacattcacagtaggcattggcctgagcaataattgtgaatgtttcatatttagagaatgggtagattattaaatatgaactatgaaaatttctacccttctggtttttctgtgggatataatcctctggtcttaaaaattaattttagtaatggattttcacaagttcccttggagagcatgcttggaacatttttgtgacatacactcttgaggttttccttctaaatttcttttcatcactcattttgactttcagatttcttaaatatttgttattacgtgtatctttgtaaataaaagtgaggcttaagaagtttgactttgttttaggatggaaccttgttaaaagtacaagcacacatgtgttgacagcagctagaggaagcgtgatagtgtggaaagaaacagaagtccaaagacctaggggtacatcaagttccattatttaattgtcatctttgtctttgctactgaaagtatggtccacagaccatttgcatcagcattgccagggagctggttagaagggagaatctcaggccccttctagacttactggatcagagcccgcattttggcaacattaccaggaactcatatacacactcaaatttgccaggctctgaactctataatctccagcattctgatttctccaagtccctcctttctcatctttgaaacagagtaatttctacctcacaagtctagtcgagaattaaatacaaacatgtaaagctgctgtgttcggtgcctggcatacatggctgtcccccattcctgccaacacacaccttcaagcaagacaacttgagagaggctgagtgggagagagggtgaataaatgttaataactcacattagagttggcattttttttctttttacttgtctctattatatagggtgactgtattaattgtgcaatacctttgcttttaaataatactactgggataaaagtgagattctaatctcacatattatttcaagataagattcagatacagagttttaaagaaccacctataaaaatcaaatccacataaattcagaggaaaatatcctcaatgcttatataatattggatgtttagggtgataccctctaagcacaacttcaaaggaagaaatcattagggaaaatactgacatatttgagtacatatatgttttaaaatttaatttacttgaaaaggaatgaagataattaaaaaggaagtcacaaattgaaaaaaattatatgcatagacaaagagttgataaatttaacatagaaacaggttttacaagacaataaaaggataaatgtaatgattttcaatagatataagacattaataggtgggcatgtaaaaaatgtcaagataacatgaaaaaattagttttactactcataaaagacatgcaagtgaaaacaaccaagatgccatctccagtctatcagatttctctaaaaatgagaaagcgctcataaccagtgaaggagaaaaggatctgctttcatcttggttaagatatacattgcaacaatatttatgggaaattctttggctatatctatcactatgaatttatgcatacatttttcacccaataattatacttttgagaagttatcctaaggaattaatctaaaactgaaatgatacatgttcaaaattttcattaaagaaaaccaccaaactgtaccataatgggaactattcataaatatgtaaattatgtccatatgatagaatactaggcacccattaaatcatgttgtaaacaatatttttattgaattttttaattgaaaccaaaaaagagcaagataaactcagtatacatagcatgtcatttttgcaaatgtgtatgcaaatgtgtaacatgtatatttttaagattggaagctggtacactaaaagtgaatgttaattctgggttatgtttttcccaaatttttgcctgtttctgccctgcctctttgattttaacattgagcatacatttatagtttaaagactgttaaaagtggcacttagatatagcttaaaaataattttaatagcacagggaaattattttattaatgctagttaaattagacgaaaatataaaattttaatggcagaaatatttcaatttataacatatgcataggaaactgaaaagagtagttagctctaaatatggggattatggataaattttatattcttcacttttttatttcaaaatttttataattagctttaggatttttataaccagaacaaattacatttaagactcccttctaaacttatttgcttattttcaatctcaaattgtgaatttgtatggcctctatatttccaatctaattttacagacattaaatttctcttgaaattcagtgaaaaattagcagagtcgaagttacacttctgtatggcatttaaattcctcctcccagaatacagccactgttctacagtacagaggagtccttcatatcacgattttcattgtgtctaagaggcatgtgtttccactttgtcattatttggtctaaaaggatttttcttctattttgctgctgtttttgtacaagacatataaagaaaggtgttaagggagtgttaaatataatcaaggtgttaaggagaagagcccagagagagaactcttaatcttttcatctggtccagttgtcaaagtcttttgtctttagccatcacttttttaatcagagacatataatctattaactatgggaacaagaaccacagatttagcctgtgcttatctggaaacctcccctaaaatactactgaacgactctttttttttttattcctgtctctttttctgttgcaaactgattgtccactataacctggagaggggactcaatttttagaaactgtcttatacacctcttaattagttacctattgctgcatatacccaaaatttagcagcttaaaacaataatgaaattttattatgcccacagtttctttaggtctgtagtaatttaagagaaacttagctgggtgattatagctgactctctcatgatattacagtcatatacatcaggactgcattcttctgaatacttgactagagctggaagattcacttccaagatggctccctcacatggctggcacattagtgcctgctgttggggggagacttcaattctttgttgggtggtcttctccatggggcagcttaaggatcttcatggtttgtgggctgtttcacaaagtgtgcgtgatccataggagattaaggtggaagctgcaatgtcttttatgatagagcctcaaaagtcacacaatgtcattcccaacgtatcctttttttcacataggtcagccctacgcaatgtgagagtgaggaagggactacagaaaagaatgaattcccagagatgagtaggatcatattgggtgccatcttggaggctggctaccagtgaagaagactgctttctggccctcagtgatttacttccatctcacatgcaaaacatactccctttattgtggttcccaagagtctcattctattatggcatcagctcgaagtccaagatcttatcatctaagccaggtgtactagttttctttgctgtctaacaaataatttaaaaaatgtagcagcttaagataacacccatttacatgtcacacctctgtaggtcagaagtgtgggcaaagggtagctgggttcttagctcgaggttgaaaccaaggtgttagccatggctgcggtccttatgtggagctgagggttctctttcaagctcatccaggttgttggcagaattcagtcacttgtgactgacagactggtgttcctagagaccacctgccattctgtactgcgtaaccctcttcacaatatggcagtttactccttcaaggccaacagaagaatcttcctactgcttgggttctctgacttcatttgaccctgacctctaaacccagatttaaaggttttatatgattatatctggcccaccagcaaaatagtcctttttattaactcaaagccagctgtttagtaaccttaattatatctgaaaaaaacagaatcaaaggagtggtatctcgtagtattcacagattctatccacacttcagaagtggaaattacacaaggcctgaacatgaggagatgggaatcttagaatctgtctaacataccaggtctatgtgcaaataagatcaatctctgttagtttactcttatggggtaattaattaccccaaaacttagtggcttaaaacaatagcataactaacttctcagtttctatgggtcaagaattcagaagcatctttcttcagtggttatggctttggcactcatatgaagttgcagttaagaagtcagtcagggtgatagaaatataaaggcttgactggggctggaggatgtgcttctaaggtgatttactcacatgatcaagttggtattggctgttgcaggcaggtctcatttcttccgcaaatgaaatgctctccaggctgcatgagtgtcttcataacatggttgctgatttacattggatggagagatcaaagaggatgagaggaaagcagcaatgtgttataggacccaacttcaaaagttacacatcattgcttctgccctattctgttgggcaatcctgatgcaatataggaggcaccatgaatagcaggaggcaaatatcatctgggctttcttgttaacctcagttaacaacaacaaaacaaatatttaaaaaactaaaggaaagagatttctggaatatttccattctctgtcatgcccactgccatagtctactcaagttctcatctcctattggacctctgcggtagctttataagtcctgtccttgtttccaatgtcatccctttcaaaacgcttcaaatagcctccttaaagccatgactcctcccacggttataaccctgcaggtaaaggcacttgaggacataatctgtaccatctctggcgtcatccctttcattccccttcacctcccccaactatttttgtatttcagtcatgctggacctcttaatgtttccccaaaacatcctaagcaatttcacgtctctatgccttttcttttcctgttctctttgcctgaaataagaacgacagataatagtgactatgcaagtcctaaaatcgaggcagccacagtgctaaatcacacattggatagttcaattttattcttataacaaccctttgtggtaaatcttattaccatgctcattttacaaatgggcactcctaacccgatgtgcataatgattaaaaacatagactcaagaaaagtttggaggttctggcgtaaccctctttgttattctctatgcaactagcttaaaaataacaactttgattattctaatctattaaccagttttcagtgtgtctgaccaaatcagttgaattttatttttttaaatatgtgtgtgtgtgcatgtgtcagtatgtacgtgttaaagagtagagggaggaagttgaaaatctgacatttgatttatttctcctgggacaaaggaagtttggatatgtcaaactgctggctaatcaacacgttaatcaatgcaaatctctagtatggatatagttatattttgcccccctcttcctttccaaacttctttccagtctcatgaccagcttattggcttcatattaccaagtaaatatatcaactgcccatatgtatagtacccagacaatgagaacactgcctaaatattgtgttttcaatactacttgcttttagcaacaaatcatagcacccagcctaactttaaaaattccatgtcatccaacttcaaactataacaaaaattgagttttacagaagagtttcaaaacatttttatgcattagacacttcagaaattatctcttaaaaacaaaacaaaataaataagggacaaaaacaatagaaaacgtcaggcaccaaactgtgaactctcttttgtccatgtatgatttaaaaaaaaaaaactcactgatggtaatttaagaaatttgacctttaggaaaatcaggctgaggctcatctttgtactttttaaaacaagtcaataaaacatataaataatagagatgagtgccgctcacaggggacactcatattttctaggagcctgtggatataaacaatgaatttcatgaacacagagcacatttctacatgatctccttttctttacaagttatttatgttttactggaaatattaaaacttcatgtctctttgttgctcttgtttctttaaatttttatttttatcatcagtcattgttcaataactcaaaatcatataaaataaaacagtttcaacatcattccgtactcaagatgatctctattaaataatgatttttttcttgaaaaagcattctataattttttttagttttccagatgactatttaaaccaaatgtttaaatgaatgattaatgagtcttttatcttatttatcccacctgcctactgcaaaaagacatgaatttaatacattttagattttaaacagttgtatatctgtaaaaaaacaatttttacaggtttcatattctggacactagaaaacacttcctcctcacagcgccgagttgtatgaaaaggcagctcaattgtctttccttgagcagccttgtgtgcctgggtattcccttccatctctcacccatggagttcatattcctgttgtcatgtcaccacctctgtcaacgaaataggttctgccatttctcaaattttatggagaattatcctgatgagttaaggcagaggttgaaaacttgcagcccttaccccggttacggattttatttttaaaacccagtgtttttgaacactttacagctgatatttctattctaatggatgcattatcttcttttaaaaatacttcctatattagccctcttaaggggtatgaagtggtgtctcattgtagttttgatgtgctttactcactcttaataccgttattataggttatttattgttaaaactgtgatatattttcctttattttctacatatacatagataacatgcagtttgataatctgcatttaatcgcattagaaaggtattttgctatgtcattaaaatttttttgtgaacatcatttttagtggctgcaaaaacttacataaagacagacatgtcctaatatatgtgtgtgtatattttaactaaatattggcacaccaaaaataatggatttaatgcaactagcaatgataatgctcaaacaacaggagtgctatgaagacaatgaaacaggtgagttgtcagaacaccttctgtcattacattaacttttttaagcactaaattcacttgaaattacaataaacaagataagtacaagcattagataatttgacctatcagatatcccaaaggcataaactatcactagagggtcttttctttatgcaattaggtgaccagtgactcttattttttaaagcttttaaaataaaaaaatagctttagggataaaaccagccagatttttatcgtcaaaaacatgttcacagttcagctaagccttgctttcttttgaagaattgctctttataatgctcaccaatggatttagaaatatcccattgtaatcatgaagatctcaattatatgttatgaaataagaaacataatgaaatacttgaaccttcctgccccgcatagcagatatatttttgtatttatgatattcacagtaaaaaagctgtgctgagaagctcaaaatagtatttgatcttagtggttttggagcagaggaattggcattgccatgatttttctataacttggcgcaggccaatggtttcaggcaggactttcagagcagacttctgtcaaatttgccatatggagttactgggctcagattatagaggttttcctggttgtttgcctaatttgggaattatcagtgctctccaggattttctccaaaaacaaagaacatgttcagaagaaactgacacttcaggaagaaaagtagtttgatatttgagaggtttagatggtttctaatatttctaaaaggtaccatgactcgtgaagaatttgactggtaaaaaagaaaggttcctgttatccctggaacacagctaacagtctggcatgtagccttacctgaactggtaccctccccgtacacctcacacttagcattctgcacagccaaagaccctgtcagttattggccagcctgaagaatgaggttgaattcaactcagggactgaaatctactttatagcattttaaaatattgtagatccaaccttgagttgacctactccgcaggttcatgggtgattaggtgtgagatacaatgggaatgaatatctgaaaaccctttgcagaagagaaggaggaggaggaagaataaatccaatttttacaggtttcatattctggacactagaaaacacttcctcctcacagcgccgagttgtatgaaaaggcagctcaattgtctttccttgagcagccttgtgtgcctgggtattcccttccatctctcacccatggagttcatattcctgttctcatgtcaccacctctgtcaacgaaataggctctgccatttctcaaattttatggagaattatcctgatgagttaaggcagaggttgaaaactcgcagcccttgctccaattacagattttatttttaaaacccagtgttttttaaaaaatcgagggagtttacacaaaaattcatgttttctgtttctctagaaaacagcaaatctggcaacaccctgctcacattcccacctaccaagaatgctgcacattaaatggtggcttttctttaggtgactctaattcactggggtctccatgtgacgtttcagcctttgcaccctacttgtccgctgcaggcccaggagctctctactcctcatatgcattacaggaccccatgcacattgaagatgttttctcaggcagagcagacaccaggcaaatatcttctggtcttaggagcaagtcttctgagaatcaatgatgacaaatatcttaaatggtctactcgatggttctgaaaatgtaagagctaaactacctgtatcaaaatcatcttgggggcttatttaaaacatatatgataaggccccacctcaaacctaaggagtcagaatttctacggaaaggcttgggaataggaacattaacacaagcatcccgggtggtttttatgaaacaaagcttgagaattattgaattcttctccgatctgacagctcttctcctgggcagacccaattagagggaactgatgagttttaggaaatactgtaattctaactcatcagtccagcagtgctgaaaatgcagaattttgtccttatcaaaagccaattaatgctaaccttttcagtgtgtgtccagtaccaccatcggtaaggtaaataaacaggcagttttgcatataatctagtgatttttaatttagttttttcccttactcatcctaaaaaaagcagggagtcattgggcttttgtatctattttagctgagttattattttaacccctatctttagtgcagaattaaaatatcacccttctatttgcttttattcctaatatctgaatggtttcagcttgacgcaattagcatgtagagcatgctcacctactgtaatctcccagatgagtcactcagctccagcacataactgcttctgggatcctgttggctaaccaggctttgaaacccagggaaaagaactgtgtgttttcttcagaagtaatccataaatgagaaattaccataaataggcagttttattcactctaagtgatttttacataaaaactgacaaggccgtaaattgtatatagaatcaggttccatatccacacagctaatgcacacatgaattattcgatgaaatttgcttcagtagtattatctgaaattggtttcagacaatacattaaatgttacacattatggtaaatttactgtatttttgttccagccacgtcttgtgttggcaaatctgctaaatttaagtttgcattgtattcacatgtgttgctatttcctgagatgtcccaatatattttagccatcaaacaaatagaacttcacctctctgaggctcagtatccacacttgtttatcatgcaagagacatgcaggtgagaaaataggcaactgccattctatctgtgattgctgttcatggaagaagtaaaaatgagctgggacaatatataggtggcgccagggatggctccttgaaggaagtgatctcacagctcagacctgaaagctgagtggaagttaccagaggaaaagagaaagggaatgcattggttttctattgctgggtcagaaactaccactaactcagtggcttaaagcaccattcattatctcatgttttccctgggtcaggagtcaggtgcgtatcagagtctcaagaggctgacatcaggtgtttgcagatggcattcatgtctggggctcagggtcctctttcaagctccttcaagttgttggcagaatttagttgctgtggttttaggaccgaggttcccactttcttgctgatcaccagcctggggcagctctcagccccttgaggccacctgcagttcctcatcctttggcagatcctctcacaacgtggccacttacttcaagaccagcaagagaatgttcctcttcaggaagggcccaactcctccttatggatgttcttctgattcagtcaggcccacccaaaataattgccatttttggttaactcaaaaatcaactgatttgagatccttaattacatcagcaaaatccctccaccttctccatacataataacctaatcatgggagtgactgttcatcctgttcgtgattaggctcacatataagagaaggagatcatataggacatgcatgtagaggatagaatcttgggggccatcttaaaattgtgcctaccacaaggaaggattttccaggcaggaagaaccagatatatgaaggaggcctaaatgacaggatagcaatttccagtgtctgaggctaaggctggaatgctgacctggccagatcatgcactgctaggtttaatggcctatgcatactctattatgcaattattaaaatacctgtttacaaagaatatttgaaatattaaaaaatggaaaactgcataccgtaaaatattaaatgggaaaatcaggatatgtgtttatataacatagtatcagttttggaaatatatatgcatatcttaaaagactagaagtaaatacatccatctgttagccatggatatctctgggtgagaaagtatggatgagttagagattctttgtcccttttcttagttctaaaatttgccacaataaatatgtattctcttataataataattaattaaaaacctattcatggtacttgcaaaaacaaatgaatttgagcagtctctttgaaggaatcaaattttgtactccaggtgtttgagaggttgaaaaacaagctcaggaattagctgcgcatgatctgtacaaacaaggggatcagtcagtggaaatgaagtccagcttcagccaagggtggtgagtataacagacctactctgatatgtttcatcactaaacattgagcaagaaatctagtgtttaaattatggaggcattaaagcaattaacctccctctacctcaattttcttatatctaaaaattgaggggagcaaaattccattcttgtcacaggtctcaattgcaagtagcatgcaagcaagtaggctgaactcttgtctgtcaatctagctccttcctggatggggtatttaatcagctctccttcccaagcacccagtggacttgaagctcacagttagacagagatggctagaggtgccaagtgctgtttatcataggtgacatcacctgtgtgctcagagttataaacataggcagcttgcctactgccaaatccattacaactttcagaggtgttcacttaggaagaggaggaaagagttttttgagaaccagatgggaacttagaaataagtaacattgacaaccaaatccttcagacacatcttcaagtttcaagagagcagttaacaaaaaagaaaaatgtatttttagaaattgtttgggaggtgaaaggatttttctgggggggagtagggtagggaatggatagagatgatttttttttggctctgcaatatctcagagatctttgagttgaaatataacaaaatgtatttcctctctcttgctccaaaaactgaaaagcaagtgcactagaaaatgtcagagttggccactgaacagaccatatttctaattcatggcaagatggctaaaataaaaattcttgaaatacgtattttaaaattagattttgacctttgatagggcttatcatgctatttatattgtagcagaaggaactgattttttagtagttgcctcatcaaagacatgactcacatttccttaagcatttacaccatatgtttcctgaggtaaaaaaataaataaataaattttatattttttatacaattagtgaaatgtgagcaaaaaatataagaaatcatttaaaaaatattttggggaggatgtggtctagaaatgttgttttctagaaattgaaattatgttagctatttggccagtgtagccattaggtacatttatgaatatagatgagaagtaatcattgtgatgctagttttatcattaaggaaaaaagcagaattcaaaagtttagcaatgaaacactggtactactgaaactcactttatatttgaaaatgtgaatgtgagtttaaaaaagcttttgttagactaactgaaaagaatcattttaacatttaaaaagaaaaatattattttaagtgacatttggtgacattattatatgtgtacaagctgtgactataagataatgagacaaattattatgtggccagtggaaattaaatttatctttatgattactagcaacagggactattttattcaactatctttacataatacaaaattattgtaaaatttctaggaaattcatattccacttaaaatatgaggaagtacatttggaaaaaatattaacatatgaaaatcagcatcccagttaaggaatccccagtttcccacttggtgctcaaatcacttcacgttttatttcattggtactttttctagggcagtagatttaggaatagaaaacagactctacacatggaatacactaaagtcttgaggaggtgtgatatttccctaagtttggataggtggtatcatcctttcagtcactcttgactctgcattagactctctacctaatgatccccaagtcatttcacttctgccttcttaacattttgaagatgtcctctaaaatttcaagtcccaccatctctgcctccgaactcacctccctgactttcagtcttgaagcaccttaacaacccctcccctcctgtgcatgttccacctggaaaccagggtgatcactctgaaatgccaatctgatcagtcatttccctacttttgaaccttcaataacttcctagcacctattcctagaaaccattccaacatatcacctaggcaaaggaaacccttttcttacctggctcctacttatccctccagattcaccttttgacacctcccacttcatctctctgcagcccccttcctgcacacacacggagtttcagtcttgccaaactcttcgcagcttcttgagtggaccttgctctctgcactacaatctctttctgcctagagagtcctttacctcccccaatctggttaacttctactgtttatttaagtcttaactctaagtagatgtcatttttgaggatgctctctctgttcccactttggaacttgggcttctctgttgtcctgggtgtcccgtgtattcctctgtcatagccctcatctcattgaattgtaatcatgtcttcactagtgtttcctttctagcatgatagatttttgtattgccagtgaccccaacaaattccccaggtcctagccctgtgactggaacacagtaggcatttaataatagttgacaaatgagttagtatatgtaatgaaaaatctacctgcctgagcattaggaaatataaaattaatctaaactttgccactttctgtaatatctgtgtgtcagtcaggaatgcttttggctgcaagaaaaccccactgacagtcttttaaaacaaataaggaagtctaaaaggagtcagatgctggccttggttcaatacaatgttagaggcagcatctcagtgcttctctaatggtcacaaaatgactacagtaactccttccctcacatccacttccagttcaagaagcagaatgagagacagcaatagccaccctgtttcttcatcaagaaagcaaagatatcttagaagtccccactgtccttcatttacttctcatgggctagaattatctcagtggccaccccaagtgcaagagaaactagggaaattagtttttagcattcccacactctatgttgaaaatgagtaagagacaataatttggggaataggtgtgggattagtcagccaacagtgtttgctacaccttgsgacaaaacattttacctctcttactctttgattctttcattgagtgaagaattagaataagtaatctttcttcaagaatcaattttctctcatctataactcccatatattcttatttccaaaatggaattaccttctacaccagacagttacttcaagcttttcccctgaatatttcacatttccagaaagcactatattacaaagaagcccttccttttcaagaactctatttgccataatgttctccctaacaagggctgaacagtacgtgcccagattccctgcctctgacctcaccacaccctcttctgtgtggcggtctctcaaattgtttaggacaattatcatgacttctctaaatctccctttttccaggctcaaattccctatgcttcagtagtttttcagataagccccttctgtcccttcacaaccctggtcagccaacaccagacatactctcttcatttacttatgattcattgaacagataatcactgagttcctgccatgtgtcagcactgctctaggagctggtgatatggtgagaaacaaggaagggaaggcccctcctctcatgaggcttacagaggagcaaaggaatcagatgataagataagcgttacacacacacacacacacagaggatcatttcagagagtgattcgtgccaagatgaaaatgacaaagggagataggagagtgacaagggatgtgtgtgtgtgtgtgtgtgtgtgtgtgtgtgtggcagtgcacgtgtgaaactagaagacaagccttcagatgatcagggaggtttctctaagacctgaatggggataattaactagcatggaagaggaagaggttttgaagcaggaggactttgtaagtgaaaggccctgggtagaatgagctagacctgagccaggaaaaaaaagatgctcagagggggaaagtgttggaagatggcctgataatgcacatggggagccccccaccacaagctcatgtaggacaggacaagaactcagattgtattctaaatgacagtatttcaatacccatcttaaaatgtgtctggacaaaacttaacacttagctacacatatagcctgactggagcagtccagtttataacctctccttgtagtgggcactgtatttctatggatgcaagctacagttatatgacttttgtggaagccatgctatccccacagttccactgtgatttcctatatgctctttgatgcacactgctcacatgcatgaatattacttgcacaaagagagagagtaggtggatgtgatgccaggagctattagaatgattcacattacacttccaccatatgaaaaataatgtacagtctaaagcaacactgcatcatatcatcgagcagcttgggaaagcctaaattacatatttgaagttcagtcagtcattgaaattagataatctggatggtcctgaaagtgtctttcttgagagctttcctccaaaagcaaaattgaatggtaaggaaaaaaatgaagtacaacaaaaatgacagcaaaaaacctgaaaaacaaaaaacaaaaaacaaacaaacaaaaaaccccaaaaactgagtaatatcaaccaggcaggagttgaaggagagaagcccaactgttggtagataacttgggatgagccaattaaatattggtcttctctctctcagaggccctaattgcattccctccagcagccacaggcctggggttttccccaggcctgtggcattcagacatcagagctgagaactccagtgaccaccaggctgcattttaatgctaagctgggagcattgatactctccaagacagccttgcaagctccatcttccactgactcaacgttcagtggaacgttcagtgtgtttcatctgctgttcagtcatgcaggcagcagggatcctgagggctctcctccccaatatggtaccaagttttgattcatccttttcctcttccctatcagcaggtattctagaagacagttttatgatgacattcacagctagcattaaaaccagataaaaataaaacaggatgtcaataaagaactaatgatgtgtgtctgtgtaaatgtataataataataaaaagaatagacatctgtttgtcaaggtaccatttaaggccttggggctttaaatgaaactgctttataaatgcaccaacatatgtgactgtttgcctacgtctttcatccatgaaaattgccctgtagacagttgcctttgaggtgaaaagcattctataggcactaaatattatgctagaacacctctaagtgctaatctaactaccttcatgacggaagtttcaggagaacaatttaagggtcatggaaaaaaagtgttaaacgagttggtaatctgacatttcctaaaaactagattcaaaaccgaagggaaagtagagagaggaatcaaaactagcctagtaggatggaagtaggcctccctccttggaggtgtgaaaatgcctggaataatttaggcaagaatgccaactgtcagtgatgaccttggtttaggggcagttatagcatggtggaaacacccctggactggagatccggcatcccttatggggatatgaaagaaatttggcaggtctcttaacctctttgacattcctttcttctttgttaggtaagaagctggtgctggttcagtgtaatttgaactgtgttctgcatgactgtagggttctgcttagtgccacgtggaggtggggatgccttgggtgaagatgaaggaggtgtagtaagcaggtggggctctgcactctttttactctccttcttccagtatcatcagaacaactccacttttttgtctttatacactgagttatttataaaatcctagtttttttaagtgtcaaacaatgcttgattatgaaatgatagcattattctagcattctaactaaagtgtgtaaattataaacaactatctttaatggtcaacaaattgtcatcattactgagcagtgttgttagtaacaccaagtaatacaattaatgaaatccttgaaagtagaacctatcagtgagccatgcatacaactgataagctgtggataatgtatagaagaatgagttcatttggtaattatttgtacttttcaaaatattggtgaactttcatctttaaggagcaatggtgtcctagttattcttgccacaactgcatggaaactctcgaatctgttagtatgtccttgggcacaaaaacagtattttttggaactgctcaaaaattatgtagttttgtagacatttagggaaaaatctcataatttatgttaaacactcagttgtcttggtgttgattgaaagcaaataatacgtgcttaacatcctgctagttgctgagggagattcattcatcattttagaaaatgtttctgggcatcagtcatataataaacactttcccagcacttggcttcacaaaggaacaaaacagacaatgcacattcctgccctagtggagcatatattctagatgacagactgaacacctagacatatatgacaagctctttcttgcaaggagagtccagttaggaaaatgtcaacacctaaaacagttaaaggctaagatagcttctgtggacactaagtgctacatagtagttccagaggaggcagagagttagacctggctagacactggacagggggtagaattagacagatagttcctggcttggtgcctggtacatagtagttgctcaataaatatgtgttgaataaatgaaaaaccaggactgactgaatagacagtttacacatttacataataagtgtgtaatttagggaagtggggttagaatgagcctgggtgaaggaagccttgaatgagagatggagaactgtaaacgataaaggttttgaagttggggaaaggtgagggggaagtgaagtgtaacatggagaagcaaaagtgtgaatattttccaagatgcctcgacgttatgatagatgaacctctgagacagaatgtagggggaagatagaggaaagagccaaagagcctctgagggtgcaaagaagtaaagaaaaaccaggatgtatgatgagaattttattatggagctatccagtgtggatgtgacttctcttccccatatcgacacaaaacacttagcaaaacatttctctttctctctctcatgctctcctgttctttctccctctatctctatctccttttgctctatctctagatatctattagacagatgatagatagacagatacatagatagataggtagatagatagataggtagatagatgatagatagatagatagatagatagatagatagatagatacatcttggaagtggtaagacagaaaaagtagtgagtatagcctcaaaatggctgcagggcaaggtaagaagctgagctcagccttcaatccaatccctgtttacactctgcctatttatttgtttataatatactctgactccccatcgacatatttacattcttggtagaagagattatttttgatatctctttgtatttatttcttagcaccaagataattttaaccactattttattattgtaaattctattgtttttactccaaagaaatacatatttgttgaagaaaaattagagatacagataagttaggaaaataataatatcagaaaacagggccatcatttaaaacatggttacataaataataaagtactgtgctaagtattgtaatgatgctgatgcttttgtaataatgatactgatggtgaagatggtgatggtgatgatgatgacaatgatgaacacatacctcccactgattatgtgtaaggcactgttctaaacctttgtctaaattaatgcatgaagtcttcacaacagcctcaatagatgttattcttcctccctcctatttattttattttagcatattttatagatgaggtatctgaaacagagataagcaacctggcctgagtcatacaacacaaagtgatggaggtaggaaatgacccagacggtcaggctccagttttttgggcactaccaaattatattaataatacaactctgtagcagcctgctttcgagttatggaatagtttctagaataagtcacacacatagatttcgagcccaggaccatctactctgagcagaagctcctacctaaccttgactataaactgactctaccagataatcacacttggcctttctgtaagtgataagcaacttgcctctgtgggcacctaccctgagaaaggtagtcaccctgctccatgctctgtttcaagtacatttattattatttatgaattacttattaacataaatttattattatttacgtattatccaacttattaagtgatgtatatgtatgcaggtgtgtatgattatgaaatacaagatgaaagaactgtaagaaaatagctttgaaaaaattagtaatgactgggccatagcccagtgataaggcatgttcacatataccatttcctttcatgatggtaacagcccagcaaggtaactgtcatcagggctgtcatgtattctagtactgtttgtgtactgaataaaggcatttgcctgagggatgatagggctcaaatccaggctgcactcctcttgatgatctatgaacccaagaagatgagtctacctggagggaaaggcttttccaatatgcacaaagttccacagaagctagagttgtcttgggaatgattatctccattttgtaaataaggaaattaaagatcagaaagattgagtaatttctcaagaatatgtatccagcaaataacaaatcaaggactcaaacctaggccaatatggctctcacttcctttctccaaaatcactgctatgtctttcaactaaattgcattgctctgttcactggtacaaagcttgttgcaccatttaaaattcaaggactatctgattgtgtattatatttttagatcctttcctgaaagcaggttttaatggggagggagaaagtagcaactggaagagagttttgagatggtagatggtaaaatgtgcaagcaaattcccaaaaaatctggggacacagacttcactgccttcagaataattgaaaggagaacccttcaagtatgaagcttcagctgaaatttcaacgtggtttatttacctaatatgctgttcattaattacaagctattagtgactattagcctatgaaattgtatttacagttcagaaatgtatttgattttcacaagccttactggggaacaatgctcagtcaacactttcttcgcctaaagagtacgatcaaagagcatgaagcgtagtaaatgtttagcctttgaatttggagtttacaaaggataattatccacgggttggtgaattcatgttcctctctactccacacagcctctggtttgcatttacagttttgcacaatcagatgtaaaattaaaatataatcattccattttaaatggttccctgtacaattatctcattttaaatcttttgctaatgtggttattctaatgcaactatgatcattattttatgtatgtaaagatgtcaatactgtccagctgatgatattatctaatagtatgtagcaaagcatgttcccttcctacagtgcctcactctttcgatgggtaagatgggaggtgggagtggggggagcatggcattagctgtggataataaagcaaagtaagtacaataggtgttcaataaagtcatcatttttggtacttacgatgtagttttcttgttcctttggttccttttgcagtgggtgtatttgcttagacagagagaagtggcagagggagactgcatttgtatttggttatttcagagaaatgcaacttggtattatgagcctttaattctgtagggcagtctccagatcattttgatgctgaactttgtcataaaaaactattgatttttttcttccaattataaacatttgctggtttcttgtcagttaataactgacataacattatttcagacctttcacttagggctctgttgtgtgtttctcttgatcaaaattattgccttagcatatcaactgaatacacaagagaaaaatcaagttatctatgtttatcatatgcatttttgaatacctatatgtgatgcttgagcatagtggttttwataatcctgtaagcgatttttcaggagaccagatctgacctcctctctcacacccctttcacactgcctgcaacacaccacacataccacacacatcaccaccctgaccgaccaatggaatctgagccaactataaatctcaaacttgttgatattggataatgcctggaggagaaacacggctaccgttcagtaattccagaaagaatttcttctttaaactcagtaaacccaatggcttctcagaaagttctttctgagttttcttatttgaaatttgaaaattatttgaaattgacttaactgacatcacctgttcccctctggatctcccagtgatttactgttgactctttcaaatccactcatctcagggctgggggactgagtcacagtctgctttttcctccattgtcatttccaaatttttcttccctctccttgctgggggctggtgctaagttgaccccatttttccctccttgtgctgtcactcactgcctttccagaatcttctgcatcaggtcagtcactctttccaacttaattccatatgtcaacccattcatcaccggagccacgtggtttccttcacacaaattgtcttctctgcaccacagatgccagtacactctggcccttgccatctgtccttaagatgcaacaccggtctgcttccaaaatccctagttcagacagcctgccttccagttgccacatcctgtttgtttcccagtttaactatgtcactgccactgctgcttctacttgtcagaccttcactgacctctccatttcccccatccctccatttcatccttacgttccttccggcccccatctctgcttcaaygaatgaacccgttttcatctgtttttccatgttgggattctagtcagatttccttgaaattaaagctttttctagtataaacactcagcctgtctctctcactttaaaagtgaagacatagacacacagagaagtgagatgatctttgtccaatattgattagtggtggaagtcccttgatagccaatccatatttctttcacagtaatagaaagtaccaaactttaaaaatgagattagaagttgcctttacataaatgtttaggcttttgakatctcagggctattttgtaatactctaattttaggaatcattgttacaatgtttcaaatctactgacttacacatatatatcctacatatattgtctaaacatattctgtagaagcaatggggattcatgattatgaaaaaagtggccattgctggtttaggcagtgtgtaaatgttgctactgacatcctaatgtgattttaattcttgcagtctggtgtcataaaatagctttcaaaaaagagcattttgatcacgactcattttccaatttctctcctccatgatcccaacatcttcctaagaaatccactctgtacctgagtttccacatggaacttaggacaatgatgttagtgaattagaggtctggcagaatcaaacgaaagtaatcctcaccaagtcactaaaccacactactttgagtctatgcaagttcaggaatttctatttgagcaaaagccacaaatggccagagcggacctcaggctttgtgcttgaactgcctaatgccatttgatttttcgatcccgcacttttccttgccagaccaatggtcttttctagcagtaaaatttcagaataggtaggctaccatcactctttgggttaccccagtgtttacttaagttgaaattcaaatagatatgtatttctatatgaatggctgccattctgctatgcccatgtttctgtttctcactcatctctggcttgtctcgtagagccctttctggtgctgacttatgttgctgagtcaaaggctttcatagtcaaagctcttctttttatctgatatgttttgcagtttgctgtactgcgtcaactctactgggatcatatttctcttgagactaactactaggcaacctgtgccttcttcctgcactgcattttgcaagtgcttcttaggatttcactttcatttaaaggcagtagatagctcagagaatgtggaacagtaactagaacagatccaagagctgtagaatcaaagaagagttaactactgtctctgaaacttagaatgtaaccaaagtcaagctatgcaacctcactaagcctgttttcccatatttaaaagtggattgtaatgtttatgagtctaccactacatyagattggtgcagtgattacaggagacagcgcatgtaaaactcctggcatggagcctgatgcatttgaaacatttactacaaactaccattgttgttatcattattaaaaataacccattctttcaaagaatcttgttcttggccaccaagcttggaagtcagtgatattgttcatcttatttgcccggttttttttttttttttttttttttgagaataatttatgacctctgtggcagcaagtctggcctcatcttgaccattctatctgcatgtactaacttttcaattttaatggccctgtgagctttcctcccataagccaaaaagtgctgtttttctattctagtgttttcttgtcaggcaacaataatttctaaataacatgcctcttctaaaccaatctcttaaaaaatagattgtttttgtttctgaccctttctcattccatttcagaaactattttttctccttctttaagcaggttacaaacccttatatttttaatatgctgaggcttgtagtcaaaccattactgtcccaaaagaaaagcccttttagcacatttacagcttcttgctatctgtgccctaactaaattgtgctacagggatagtttcttaaccattaaaatgataggtgaacacaattttattttgaaggattactaagctatttttaaaatttctatagttagaaaagaaaaactgtttaactgaaacttgaacccaattaaaataacaattctcatggctctccgttttgcaatactttcctattcataaaataagaatgtgcactttacctttttgacccatatatttgatgtttttcaattctctacacgttctttatctctctgtcagtgtggaatattctgatttgttaattaatacccaaagcagcagttggctattaatgaaatgtacagaaaggtatttggtaaaggctacatgaagatgatgatgacaataacaaagatatctgattgaaagtaatctttacctgttaatcttcccttaatgtctccgactacaatggcagacgttgctttcttggatgatgactgaaagattagtttggaatgaataaatttatttttccatggttgattcatagatttttttagaaattactaattttgaaaattaaaccttctttttcagccttttgagttttatgtttctatagtttaggcttaaaaataatgtagacattagaaaaaaactcaagcggtattaatccttatatccctaatggtaaagagcgaggcagctaacaaatgaggtgctggaacactagcaagggagcctgtctctcttctggtccttttgttgtccaattacaggtgaaaagatgctatctgtcagcttgtcattaactcaaatacacaaaggcctgtcagttctcttatgcacttgccaatgtgagcacatcccatattgatgtttctactaaggcttgctgtacttgtaaacagtgtacttgtctggtaactaaatagggacaagcatgcagtaacagtgtgacactgagcatttcagttatatgtcttcttacctcagaattttaagaagaaacaatgctaaaggagatttttttttaaattaaaaacaaaaactacctttccagggtattttaaagaaagaaggtgaattccaattgcacatacatccggtatgtgtgacgccaggtttatccatggcctctctcgccctactgctttttaagtaatatgggaaatgcaaataaacaaataaaaacctacttaaatagactagtaaaaaattgagcaataagggatcattgtataattagattagaatagtgattttgcaaagggttttaaaatgccttaacataggcactgacaaaatgtttgtaggtcttactaatgaatttttatgttttttcaatggaatgtgcattagaatgaggccattagttctttgtggttaaccaaaatctcaagatttcttgtaatgagagtaacttttctttctgggatccctgacaaaccggaagagagtgctgctgaaatgtgggaaaaacagctgtgttataacaggagctgccarccccccacacagctggctgcagagataattaattgtgaagagagtaaggaagtaattcacataattgtgtaaatgttaagtaatttacataattgggtatatatacaaatggatttcttccctaagctatttttttaaatacagaaaaatctaatctacaagcagttgattattaaggaaccaatttttaaataaaccaaaaaaagtatctattctaatgtgtgctatttttcacaaaaaaagtgttttcctgtgactgtatcctgcatcccttgttacaagtgtgtgtgcatgtgtttgtgtgtgtgtgtgtgtgtgtgtgtagataagtatatgatgtctttctgggactatatgcttaatctcactacaattacttttgggttattccatcagcaacacaagtaaatctctctagatactatttatctcaggagtgacaaatatgtgttaagaatgacttctattacccctgcattataagtttattttttccagtatttttttcccctttgatttgagacttagcctaggcatcattcccaaagaagtgctccagacagccgccatgaatgaatcagaactggcccttggaaggaggcctacctgccggtcctctaatggacataacttacttttacctcacagtgttactcagtgctttatctactagggctcatgagatgcagtgttcatactgttttgtttccagaatccctgggtgtgttttattccctcagttgtatataacaggacgcacaatggggtcaggccaatattttttggctcttaaaaggactcttgctgaggtttgccagtacctgctgatctgcagctcccccagcttcataagcagtgataggagtactgagtcagccccaaattaaagaaccatgcatagaacaatgccctgcagcagactcgtaggacaaatctgaaagagcatccccagactcttgaggcatagatacctcctgaaaataagggtctgccttctataggtcattactttggaacatttaataaagcattaccaaaaagaaaaaatacatgtattttataccctcacatttctttttagtcatctttagttttgcttacagtctgattaccccctcactcccaaatccttagctccttacaaaaaggaaaaaaatattttctataacatatatctggaagttttaattttagatttatagtttcacattttcaagccagtatttttctagttccattttgctctatttctagatcattttttctctctcttttctcttaggttttgaaattgctttagatctttaaaaagccattcaccagatttttttttaacttggcctcaaatcatttttactaagtattttatttgagccatcttttttcttttttccatttgttttgttacttttctctccaccgaccctctgctatcaggcaagcatttatattttctattaagtatatagtttctcctaatctctataaacaattatgtgaaaataataagttaacaaatacaatatgacctcaattaactgtcttaatacaagtggaaatggcagagataattccaagagccaattttttattttaatgtgtttttcatatgtacattttaatgggagcttttatgatattatttttcagccacactatttcaaagaaaacaatggagggcattttgtggagatcaaattctggttgagctgtttggacacccagctgcccatcctttctctaatgctcctcccgagcacccagcatcatctctcagaattagacctgaactagccctgacctgaactgattcttctgtccctggtcttctctttctaaattatattttcttgatgagtattttctgtttctaaattagcatcctccttctgggcagtaaaattgagtgagtattagacaaaattgtgaaacgtgtaaacagacattgaatggtttaattaatcagcaagatgtgcagttgaacttgaaagtaaagcatgtgcataataatcctgaagatgattgaagattaattttagtatctgtgatcagataaagacacatttcaatgatgcaacaatgtttaacacttgcaggctactgcaacagaatacttctttagggtcctgaaatcattcttgctttccacaaacttagttgagtgcattaagagattctggctcatagactacttctgcttgttgactcatgccttatccttttcacaggatcactatctagctttaattaattaagtcaggctaatatttaaccagtcttaactactattgctcaccttgcttttctatctcgtgttcattgggcctgtcttagcaaaaaatgactatagaggcaatcaaaattttttatctgatcataagttcaaagttcaagtcagataatttaccttaaatctggattgaaaattaatcatatccccaaagttttggcttgagtaacagtctagatgtttttgtgtatttccttagattcaattctatcaatcctctcctgtgacayctgtaacattcctatagacgattcctgttcaatggtaactcttcacagtgtgtcaggaagagctcttagagatactattagtcagattattcaaataatttctttattgtatattcctatttggcaccaatttgatagtagcatttccttgtgtggatagtttccctttatctattaaaaaagcagtcttttctgactattttctattttcccagcctctactcccttgcttggaattgactgctgtgttaagagctatacaggtttacagaaactgatctttatgattcccaaaacacttggcttttgtgtgaaattgcaaaaattgaaatagcctctttggtacttggtacttattcaaaatgttctcatgtgtcttttggctgcattgcatgttgtgcacaggtaccctagaacttaaagtataataaaaaaaaaaagttctcgattttccaacactgatgatagttccgactttgcagattagcaagaacatgaataagattaattttgcataaatgtttttcatgtgcacaacttggagatcttcagaagaaagaagcaacgcgaatctcatacatataatctttccgtagcttctactgtaaattttggtgaagtgaaacaataaaatttgtataatgtagaaattaagggctgatgactgaatggtcattcactttaaattcatgtatttattgaaattattactcgagttcttggctagggatatagaggtgaacaaggcccaaacttgaaggagtgagtattgcactggagagagaatcatgcttacaaaatattagcaggcccatgttccttagtctctgaatttgtaacagaaaaacacaaattctttccaccctgagtcactcctatccatgaggaattgattgatttaactggcaagtggcaagaatttgacatcccttggttcaagccttccagtggggtaaaggtgtgcttagaagccatgagcacaggggatcttgttctctcatttcttattcccatcaccagctttccccagtagactggatgggtgagaaggaaggctcaattaattgcagaacaattgagtaagtgtcctccatgagcagtttcctcccagctgctgattctcaggaccaagatgaggggaataattagaaagcctgatcctggctgcaggtctctgccctgatgcagtggttgttaaagtaccagttaagtacagctcaagttgttcaactcagaaggcacaataagctttagcctaatactacagttctatagctttatggatggatacagggcaacggacacagcaggtgaagcatcttaatgtcatcagatgagacagaacccacccaggtacacagcttccattgcttcctcacagagtgtgtgcggccaccatggacaagaactaaacacctgggggtcactttaccacagagactctgtcctcagtttccaactagtctttcaaaactgttctggtttagatgcccaggtctctatgctaccctgccagctccccaccccatgtgcagtgccaccaccaacaaggcagacatggcatgctgtattcttcttaactctgtagcttctaaactatgagtgctatgagaaggcaactctgagatggttcttcagcgtaggcctgggttagctcagacctgatgctaaccctttacttacaatgtccaatccagatttttcaacaataaagatatttttatttttattggatgcttttgtatgcttaacattttatctccaatgtatcacatgtgaaaggctctgtggagtcagttacactcctttctctctggggtaaggacagttgagatacattgattgcacccaattgacacgcagagaccagtagacatcagacttttttcatcttactaatgaggtaaattaattatgtcttcccgtgaagaggtctaaagtgatgctctagtgctattaccaatccaagagtggtatcagaagtctcctttcagaaattgagacaaagaaagaggacacctctattttaagaaaacaggtataatgctgtaatatatcactatccacagtgcagtgggatcccaagtgaaggtgtgtccaagtgtgcctggaggagatctgcttctcattgtagtgagaatttgagctgggatgataaggctctagtgaggtgagcagagagagggcattgcatgtaagggctcagtggatgccagaggggagctgggcaatatccaggagattgtgaagcatacaaaagactgggactttcccgccaaattcatacttacattattaaataagtacttgtcgtcatccaagttaattaattgatttatttagatttttgaaagcctttgaaattgtatataaagatagatactcaatctttacttaagaattccattgtgatctcaaaattctttgaactattctcttactcaacaaatatttattgaatggccactgtgtgtcaggcactagtctttctataaacataagggatgctgcagtgaacaagaccggaaaggtccctgctcacagaagggttacattctagagcttcactagcagtacagtggtacagtaaccaccagcatgtgtcgtgatggagcacttgaaacgtggccagttccagtggacatgtactagaagagcgacgttcacattggatttcaaggactttgtatatatatacccaatgtcaaaatatctcattaatataatttttaatattgccattacacatcaaagtgatcagttcgttgcattgtccttacgtaaaatacaatacacaactaaaatgtgttttgtttcttttacttgtggtctctataaataattacataggtggtcttgcctttctgctggacagtgctgctcttgaaagaagagtcaaaaaatgaactacttgacaaataaatgaacaagatgttttcccacagtgagaactgctatgaagacagtaaaactgggtgatgcaatggagagcgacagagactacgttaaatcaaccagccaaaggaggcttttctgaaatgcaattttgctgacatgaggatgataggcaggagccagccagatgaatttctgtgggaagagcagcattctagatagaaaaatagcaaaggtcccaaagaatggcttgttatcttaaaaaaaaaatggaagggttaagtagtaataagtctgaaggagagttgtatgagaggaaatcagaaaagtaggcagggctcaaggaacttgcagacttggaggtaagatgggatgtttttgaagtgcagccagaaactacagaagagttcctagcagaatgacaaaactgatttacatttttagaaagacctctctatctgtttcatgaggtaggagcagaaaaatgtgtaaagactgttctagtgttgaatcgcagacaagggttccagaggctgcttaaggctttcaaatggagcctctgggggaaaggagaggctgccaagctggtcgactcctctcttggctaaagctttgctgggcaagctctgtccttccctccattcttgcattctgcaggcagttggagataaactaaaagcatcactgttaatgttgtttttcaaagaatggaaaaaaaaagaatgcattataagcaggaaatcatgaaatgtgggggaaattgctttattggcccttggctggagtctacaaattggagcattatacaggaaggcattaaacagggggcgaaagggacatgagtttgattttattagccttaggtgagagatgaaactctttttaaagctccaagaacccctaggacctgagttgagaagagacacagcacaaagcagtacaaatctgctgaagcttcagataatcttgaaaagagtagaagacactgcagctctatagctagagaaaatcaagcctgctttgttaaaaacactgatttgtaaggatggctgtccattctgtaaaccagggtataactcttttacgtgacaagaccattaggaaaaatggcaattagatgagccaggatttcagcagtcagtctagctgaggaaagcgttttccatccctactgcttaccggccattttgggggaccatgatgactgtatgagacagccttagtttgagacagttgctggaacttgactgtcatatttgaagctgccaagcagtcaattgacaatgagttatcaggggctgcattgttttaggccacgtataaagctggattggacaggtatgcagagtggcttctactcacagctgggcagctgtggtttcagcagtccttgtaaaatgccttacttgggagaagagtcttcaaattagagtggtaaagatctatttagtagcaacattttaaacatcacatttgaacaagtattaaatatgccaaagttcagcatttcattcatggtctactctttccctctctactcactttttctaaaagctaagatattacattggtttaaaaaaggggaagttacataaaatataaataaaatgaaatataacaaattctagtataataaaaattctccttaaaaatcattacctccaatacaaagtgagattaatctatctaccttcactgtgaaaagtatatagaaaacaaaatttaaaaattacaatagttctactcatccaagatcataaaagcatgtttgtttcaatgaagagaattgtctgcatttacttggatgttcataaaactgggtttccctatctctaattctttgagtataaagtttaattatatatgccctttctaataacatataaataacaaaaagaaagtaaaatccatattatatcatatataaatagaccaatttttcgtcagtatcagattaaataaacagtagcctgtcattccaaaacacatgcacacacaaatcattatatacaatttgtgggaaacwtttaaaatttatttataacgattgggaatataagaaatatgcaaagacatagggcaaatccaaaccaaaacaattcagcagtaacaatattaagattagacaaggggaaatgtcaagtttaaacaccaaaaaaaggtaaaatcagtggtgttagggcgttagctggtaccagcttgtaagagcctatggttaacatatcttcctaactccatgttcaataacatcatattgaaattggccacagtgtgattatttacaccgtagaaattggaaatgatacaaatcagggctttcttcctcccctcctctagagccaattgctaaccatttactagaacaccatgggatagaaatgatgaagttaaaattatttgaaatgcacatgtgctcaacaatatagcaactaaaactataagacaaaaactrttagaaatgtaaggaaactttatttaaaacacatgattatactggcatattttagtttatttcttcagaattgtacacatccaaaaactattaagtaacaatataaataaattagatgtaatccataaacttagtaaatgaaatagacagtctttattyattcaatgtaagtgtgtaaatggatgtctccaccttaaaaatgagatattttaaataagccataattgattcaaaatggagttaccttttttggcatcactaacttagcgrgtaatcttgtaatcttcctcttaaaatttgtttttgtgaaatcctaattttctatttctttttcttttgttgttgttgttgttgttgttgttgttgttgttgttgctgttgagacagaatcttgctctgtcactgaggctggagtgcagtggcacgatcaatgctcactgcaatctccgcctcctgggttcaagtgattctcctgcctcagcctcccaagtagctgggactacaggtgcccgccaccactcccagctagtttttgttatttttagtggagatggggtttcaccatgttggccaggattgtctcaaactcctgatctcaagtgatctgcccacctcggcctcccaaagtgctgggattacaggtgtgagccaatgtgcctggccctaattttcatttattatacttcccttactatagattcaatacaagggaatgaaagcttagacgttcttggcatattttatgaactcctataaaccccaaccaggttgtgagtagttatcgcttactgagaccttaaacacaaacaatattttaatgttcatttattatcctgaataagatacatagatatatattgggagttgagcgctaccatgtcaagaggagcaagcccatagaatgatttttctttcatttttttgcaaaacaactgcaatgtcccattaagacttttcctgcatgttcgtgtcagatgaaggaaagtattttccactgataccccaggttgttagctagtcccacgactgctcttcaagaaacacaagagacctatctgaatgtgggtaaaaggatttcatgttgctttttacttagaaacccagattgtttgtaataagctctgtctgattccttcaacacttagcatccaggcagttttcttcctctaaacttcaaaaaataggagagaattgtaaggaaaatgataaaagcatctgaagttcagcaaaagtgagcctcatctgagctgacttgtcctgatttggggatagcctgaggagagtgtgttcacgcaccttgcagagtagcccttagcagccacttgaataaaaacgaatgaaaagataaacaacaggagtgggcagaagttcgaaatggaggatgtgtgtgaagaaataataacattgtcttgaagattttagaaaatgggagaggcaagaaaaagaaacatagagatgaatcctggaaaaggtatttaaatcttggttgattgttcataaagcccccacccatagcatcttcatcatccctgtgggatgcaaatattgttgttttcatcttacacacacggacattgtgtttctgacaggccaaggggctgttcaaggtcaaatgactgttgaaggcaaaaccactagtatgcagcagtagcagaaaatgaatgcatggcttctgatgataaatcctatggtcttttcaaaacgcctctgttgtctctagggaaattgcctcaaattagaaatcaacacattctactgcagttctaatttgcacacgcttgcctgaaaactttctaatttctggttcttttttaccacctcctctcccacttaatttcatagctacagaggggaaagatagctactgtccaaatagtcttgctaaaggacctcattttcaaaattctttttcccccttcaagtcttcatttgactcacggtgtaatcacattagtgaggaagattttgtacagtcatacctagtgccaaatatcaagttttcctccaaaaagcaaaataaaatgatgggcagaccacctgctttccataaaattgtaccaaaatcaaggaggacaactctacgttatcacgtagaaataacatcagcatttatgagtaataggtctgtttgatgggcaatgctgtggtgtgtaaaattctgatgacaacatgttgaaaaaaatgtctggaagaatgggagaaaaaaagtgaaagtctatggaaagtagtagatttggagtccttttgaagaaaacatgcaagaagctgccagataactgctagataagcagctattgaccatttatgaactcagttttaccaggcgttgagaaggcgagaatactcaaaataaaacctgcatagattccacccttaggaaacttacagtctggcagattcaaaacaatttcacttcactttaagtaattgtaaaattgcctccataaaagcatagcctggatgaaaacatttttcaatattatttactcattttaatgcactcaaataaactttataccaagtaacttctttaaagatctaccaatataaggcacgtatagatcaaagtagacaatgtcagcccatataatccccttctccaggtccattttgattgcttgtgtcaacattggagaccacagtaaattactaatggtccttaaaattccccccctatttatctctttcttttcaatttttctccttcactcctgctactctatttcttgtgttttttttttatctactttttttttttgctcttccccagggaaactagaggaaaattcttcatcctgataagagtttttggcaccagaaaggatattttacctgtagtctgacctacatggagtgagggagcctgaacatgtttccatgagtgttctagttcaatgggcagaaagatccatcaggagaaagcctttgtcactgatggctttgaaattgttcaaatgactttgcagttcacaacacgtgagcttaatcattggtttggctcttctgaggagctgagggagacaaagaagcaaagttattttcccagaggtagtgaggcccaagatgctcagaaaagatttaattgaaagatgccattgctgaaatttcttttataatgttctgcctgtggctttccaatagtaatagtagtagcagttgttgtaataatagagatagtagttgtattgatagcaataataatagctactatttattgagcactgactgtgtttcaggcatgggtccatgcactttacatatattaactcatttaaacctcccaacaacctaacaaggtaaagatgattattatcccatttcacaactgagcaaactgggacatgagatttaaggaacgtgcccaagctcacacagctaggcgatcaccaattatacatttcctctctgcaagagaacagtctatttttcaaaaacatgctgataaaacagcaatcccatttgcttctaaggacaaaccctgccatgcctgagtgttgccattcttaaactccaggccagggcttgcctttggatgcatgtgagcttcactgggctctctgctcaatgtccctcctcagagtgtctccctaaccacctctcttgatctctctccacccctttattccacttgggttttcttcagcacacttagggctacctgacagtgttagcaaggctacaaagcaaaacaccagatggggtggcttaaataacaatcatttattttctcacagttctggaggctggaagcttgagatcagtgtgccagcttggttcagtgctggttatgggtctcttcttggcctgcagacacagacaccttttcactatgtcctcacatggcctttctgtgtgtgtgggggggggggggtgtgggtgtgtgcgcgcgcgcgcgtgcctgcatgcctgtgtagggagaaagagaaagctctttgcctcttcttataaggtcagattaggaccctacccttatgaccacatttaaacttatttactgactaaaagccctatcttcagatatagtgacattgagagttcaacatatgaacatatgagctgataggaatatatgaattgatgggaacatatcaacacttcaacatatgaattggggtgagggacgcaatacagtccatagcggtgacccagcatatatttaataggtcattaatgtgtttactatgtgtctttcccactcctcccggtattagtaatctaaataccagtaaggatttgaggttcttctttgttgtattcctaatacctaagacactgtcccacacatggtagatgttcaatacatatttgttggataaataaaaaatacagagctccctcttctcccctacatgttggaaaatgtgtgtgatctaaatgagggagagggagaaccatctcatctaatcttccaaacttcctgagccacctttagctactgagcacattcacgtttccgtcagctgggaatttaggtgccctgcctatcatcctctggagcccatcccaggagggggcagaaggaggtggagcagcacactagtgttcccagagtggggagagcagatggagaggagttcatgggaacgatgatttacccctgctcacttacccctgtgagaggacactgccctccacgaatcaatgctggctcctcctccaggaaccaggcttctgcatctcacttgccatgctgtggatctaggaacaaatttgcatttggaaattcattttaaagtgtgcatgctgaggttctggtgacatgcagggtaacttctcccacccacgatatctcttgactcaggccttcatgtaggaggggaggagtgtttggcagcaaaactgggtatttcttaggaaggaaatccttctaagctttatggaaatcctagggtgttgtccctacctttctgagtgtggagcagactatctgtgtacatagcggtagtgaggggtgtaatattggagaatggcttaggtaacagccaaaatatacattgtatatccccaaaaagacgaccaaagactcacagggccatgctgctatcattagatataataggcawagcctttcattgatatgtaaatgttagtatttttggtaagtgccttattttatcttctggataatataagatcaaagtaccatgagggcaggatccttctctcattcattttttttcccaagagcatagcacaaagtaggaagtacttgttgagtgaatgaatgatcctaaatatgaaaggatggcattttatcgccattttccagatgagaaaaaaacgagggagcttatcaggtttatatatagtgagtgacaaacttcagaattaaaccaaaatctagtgattcctataacttacaggttattaaggagtccacctgaatgtaagtccaacaagacaggtgtttattttgtttacatacattccaagtacctaagacaatgcctaacatatataaaatacttcataaacatcttcatgtgtgaatagaattttcaaagttcatctcaatatatgcctcatgtgacacttccaacccttcactgccaggtctttcagtctttatttgaataggttcagtaagaaagaattcactcgtgctttagatatgtatggcttttccacattgttgtcagttctaaatcccgaaagttatttttgtatgcttggaatacttcacaatattcacaatttttacaataaaataatttcaggtcttcttgatgaaaaatgtcgatcaggacagggctgaggataatcacaaggcttgaaattaaagaagtctccttaggctgaaatgaatttctagttgtaaaaccaaatatgaatctatgtatttgtgttcctcagaccacttttccagcaggtccttggctgtattttgtatgcatttgtgaaatgctttgttgaaattcagtttcagccaggtctgtagcattctcctggcccctggtctgatagttgtaccaggaacactagctaacaattgcatggcactagtctcagctggatttgttctaactcttttatatgtattaactcaatccctacaaccaccccatttcattactatgcccacttgagaactraaaacactgaggaagagcgaagttaagtaacttgcagaggtctcagagctaggaagtaagacagccaactcggaacccagcagactagctctggagcctacccacctaccctccacaccgtacctgtggtccatcctcaccaaccaggcctgctgccctgagcataacttcaccctcttgcgttctaaaactatctgctgattaagtgagttctgaaatgttttcagggaccaatactaaaatcaactatgaaatagtttcagagattgacctttcctccttttggaatggataagattttcccaaccgaggtctcccatcagctctcctgttcccctggactgtggcacataggagggccagggacttgcgcctattatttcatttcttttgttatccttcatttctagatctcttctctaccacaattatctctcatgttgacagtttccccacagatgggatgtctatttccttgataatacagcattattatgctaaaatctctcatttgtgttattagccagactctgtgcaaaaacgtgtgtatatctgagactctgtgctgttcttagccaccttcttggtcccttctcatgtaaattactagggcacttcttcaatattattattatcatgcccccttaccaccaccacaaaatcttccatcataacccatttttttttcctcctccttaccacattttcagctttgaactcttataatcagatcaggaattacatttctgaacaaatgcaggctttgcagcattgtgaagtgcagctggtccccagcagagagccctaagcccctgcctgaagccaaacccccttttgtggcgagaggtctggattttatttgttgtttttatctttggtgaactgtcaactggaagcagagatgcgaacaccagttatgtcctcccctgcaaggttcatgaccaatactttatagtttctggatatgcttcctaggtttcttctgttggtgtcatttgcctgcatgtgactcactggcaggtggtgatttcatcatattctagacatgtgtcttaggaagctggcccctatcctggctggctggacacatatcgaagttccttagatctaccattgtcactttcatatccattgttaaatactatagatagcatgcaggggtcagccaaattgttctgtaaaaggctcaagcataaatattttaagttttgtgggacagacagtctctgtcgcaactacttgactgatgcagcatgcaagcagccacagacaataagtaaacaaatgggaatggttgtgtcccaataaagctttatttataaaaactgtctttttttataaataaaggagcccatcgtttgccgccccctagtgccaggaaggaacaaggggaaaataaggaagagacccagaggaaaaaaagtgtcaccaaccatatctctaactcatatttatttacttatttttctaagcgcaatcgctaaattatctcgtcttcctaaggcgtatgaatctcttacattaacttagggacagaatatagagttttatgttatcttctgtgagttctttttccattctgtcatgtttcagactttcagaggtaatttttaagtatttcagctgtgccttagatacattaagggacctatagtgcctccctgaggccaagatgatggttgcaatcataaataggttatttctgagttgagactggtaagaacagattatcctgcccagacagtgatgtgccaagcattggcaactttgaaaaatttgcaatttgattttataggagagtttccttaacaggcctgagtttttttcccattgcttttgtgaatacagtattttcccctgctagactcttagtcaaatgttcttgccattataagaaaaaaggaaaactgaaaaacttgaaaataattttattggcttaggaattattttcatgtttgtctgctaatggcaaataaatctaccttattgaatcatacggattttaattccccgggggaaaggtaaccaatgacaggcatatgtgtgtgtgtgtgtgtgtgtgtgtgtgtgtacaagtgtatgcttgtgaaaattgaacagcaaaaagaaattaggtggagaggaaaacattaaagctggtactggtgggtaatcattatatatagtatatatacacatatgccttctccagttttatggaggcagtcagtgcctcaaagacgtgtaataaagagacagcaacaattattggtggcattcatgtaggagaggcttgagccaatgtaaacttgacttggttagtaatctttgccaaaactccctgattgtygtaagggagttgtgaaccattaggtttgcttaaccagaacagcaagtaagcatccaaacagattgtccttggaccataagcaaatgcccagaaaatagccccctgcataggakattaagtacttagaaacaaatgagaaaaaatattacagcaagtcttccaggtatagaagggataaacaaccctattggtatcagaatttaggaatattattatgtctcccactttaaatgaaatacagcagcctgacttggcaaaatttggggaacggttccccttctttgcagccaggttcggtgcttgccctctggcatcccttcaattgtgtatattactggcagagacagctgtttgagctgctaataagattgcaaaataatatcagcttgtgcttcaggttgaagataagagataacattgcattggctgtaggaatggctttcttataaactggatttagttttatctcacttgtctcacttgttacttttttatttatttacttttttttttttgagatggagtctcactttgtcacctgggctggagtacagtgacacgatcttggctcactgcaacgtccgcctcccaggttcaagccattctcctgcctcagcctcccaagtagctgggattacaggcatgcgccaccacgcctggctaatttctgtatttttagtagagacagggtttcaccatgttggccaggctggtctcaaactcctgacctcaggtgatccgtctgcctcggcctcccaaagtgctgggatttcagattacaggtgccatgacgcctggccccacttgatacatttgagggtctcataaggtcttgaaattgagcctgtgaatttataaacagggctacaaccatcctgcagatgcaactttttggcatgccagaatcagtggcacctgaagagcatctccttgaaagcggtagtagataaaaggagatgcctttcaggtttcagacgtggacctcagattcacctccaagactagagttatcacagtgcacaggatcatccaagaacagacatgcagagggaggaaaggccattgtaaggctcaggagaacatagtagagcctaaaaatgagaacaaaatggtactatcagaaaagatggcagtggttgggacataagagagggtaggttcacaggtttgtgggaccaggactcagtcactttcctcgcgctaggctcaaccctcacgatggggaaagtaatgtacttctgggcttaaaattcttcacagtcaactggtagagatatgagggaatttattgctaagtagtagggaaagtgttttcacaaataacatacaggaaattcccatatcatacaaaggaggttgtattatcaccacgtttttacatatgagaaaatagagtcttagaaaagttatgtaccttgcctaggagcatgtgcctagatagtggcagctccaagattcaaacctaaaactccagagtctgaaactcacacagtttcttctctgttctgaggcttcatgcagctggacaggaggttagcctgagacaagaggaggatcattctcgaaggcagagaggctggggacatgactgctttctggaaacctgagctcatggagagaggctgagagtcaggaaagtaggacatgaaatcatttaatgagagtgaagaccagccaggtcagggagtttgaaaagagagttttgaaatatccattgtagctaatatgggagagcattctttgagagtgattaaaatggcgactgaggacacagctaaagtgagaaagaataaatctgtggcagacttgcatatttttggtatgtgcatctctttccgaaatcaattgaacagaggtgggaaaagtagcttggtggataatgaggtagagtggaaagttgaaaagacagagcttaggagtctttctgattggtctaaaattccccagggaaaatcatgtttctttttatgaatatagtccaggtcttaggtctgtcccacggcacaaagttttcaggacattctggacaaattcacacatttccctggatgtcagtcaattccctttgcctctgtgctatcactttccttctctctgctttctccttgagttacctgtcccagctcttcactccacattctgcagcctccgtttagctcctttatacctttgtccagattcttcctaacttattatactgcctcctcatgtcaacttccatcccatctgcatttgggaaaagaagcccacatgataagtgagtccatctgctaaatgtatgcatcttagagcatttgttcaagatcaataaagatacaaattattttgatttttcagctgttgcccaaatccacaagagtacacaaatgaaaatgcactgatttttaaaaagtacaaatagccattaaagtttgtattgttttattctttaaataagccggaaaaatgggaatacgtaggaacgagggagctagcaaaataggcggggcttctgcgtttcaggtggtctgagactgcagtgaccctgaggctggtggacctggaaggagccagggagagatggtggatcccaggggtgggagcaaatgcatggtccaaggttctgaatggcagagctagaccaaaggactaacctgctaaccttgaccaaggagatggcccagaggttttctatttctactgctccatcttttcattataagttcccagtagaaacgagtcatcatttaaaatatcggtgcagcacttaacacataaggaaaaatcaataacattcatttacttacagtacccagagaagaaataaattcaaatacgtaaaaatgggcatgaaccatyctgttccatatcccactttaggactgtcagcaactgtatacattgctgaacgtcattgctcttgtacataatgaataattttctgtaaccctgtgaaggccgactgatttttacggaaagacagctttgtgttaggcggcccgccttccccacggaatcgggttttcccacgccacgttttgatgtttctgagaagtgtgcgccatctgctggccgctgagaggattgacgagcagccataaggagcaccgtgtttcttgagcatgacttaaccaggcaatggaattacaattatctttgggtttctaaaacataatagacatttcaggattcacgtgacttatgagaagtcgcttaattgcctttcaagcagtatacattttttattcaatatgtgtattattctttgtaataataaacratgcaataaagcaatcgaggggttcccacatgctctctaggcagagatggaccccgggccctagatgaaaggttaatagtttggagtgagcactaactctggtyctctgactctgaatctaagtcaggagtagaatagagctgtacaaagaagactgcttgatggaattgaattttgtcccttcttcaatgggggaaaataaagtacagttttcatcaatagattaatgactaaacttggaccttgatgccaaatccaacttgagctccgcctgcacagtctggagatgtacataagagacacatgctcagcctcttagcacatcgttataatccaggcaggcaatactatatcctaaaattactcctctttgctgaaattgagaaaataggaattacccaggggtaaatttggtacataaatgtaccaaatggtatgatttattctagtactgtcttctttttcttgattttcttctttattgggaaatttgtattttgtagttccttcgacactttaaaaattaaactagagggtaagatttaagttttctcacaactaacaaatgattttgattttattgcccaaagccctttatatctcactttcgatgggtctagtccctttggcttaatttagatgtgatttttccttaataattttgaaaatggtggtgctctataccaactagctagaataggaatcacattgacagtatttaatggatagaagcatctcaaagatctttgcttaatgagggcaaatcattagcaatgtccaactccctatgttagaggcgccaactaaggcacggtacttaaatttaaagcacaactcttcgacttccataaagtacatatattacattatatttttaaattacggggtagtgactcgatatgtcactggaatgttttgaatagtgcccccggcccccctgccaaaaaaaagaatgcaagaacactgtcctaaccaagaaggcctgggagttttaactaattcagcctttcagcctccacttaaaattctggaagacagtagtgttggtgctagctgtccttggctgcaagttgtctttacagaagaacttggggtacattttggtgtgaggccactcttgcaagcagcatttgcaggcattaagagaatgcacacagttcaataagctggggttatattcataatcagtctttgtttaatgctgtaaaaatactaaaggaatggccaaaatctctcggtatctggggaaaagggttctttgaaacttttgatgtgtgagcagaataatggaaacttatctgttccccatgcttttaacacacacacaaacacacacacacacacacacaaacgtcatagatcaagatgtaacaggttggaatggggcctaggcttgggaattttgtgactccccaggtgatctcaatgtactgctggtttattagcaggctttgcccaaacaaatactctttctcacctaccaggagaaatcaaagagctctgggttaaacacttgtatgttaaaaccaaaatggtgggcattgcagagtagaggaattaggagaagaaaatagatattgggtcaaaaattggcctcaggaaccaggaagtaagaatggccaatcttaaaagagaaagttctgttgaagagggagcattatctgaagttggaatgactatggaggacaatgacagctgtcccacaggatgtcactgggctgaggaaaatcagactggaagccacaagcccatgggggctcaggaagcctgtttcctgagcagaacagagctgggtttggcacatgcctagtgttccagtgaaatctgtcatttttctgcttccactttttacaaatgagttattcaacgctactttgttgacacatggactcagcatttaaaaaatgacagtggagataagggtctaaggtagtgataggcaaatgaatgatgggcatccatcatctgaagagcttcttaaaattcagatttcccaaccccaccacagacgtctgtctccgtaggtcttgggtagggctcagagcaggctgcttctgaaattttgaggttgtgaggtaagaatacaggtgggagcctgcataccacttgtctaaatatttaaaagttgtaaatcagcctaatgaactgtgaaggaagctctggcctacttccttgacaacttaagcctatacagagacctggaagatcaagttcaaatgcagaacctgaatgtttcggttctatctgctccctcagtgttaaaggtctgtcctttttccttgacaaatatgctttcataattgtctggaaggccggattccaattcagcaattccaatccctcagtgttgagggaaagggccacccgctctgctcttctcttcccatctggctctgtctggaaccacgaagcacctctgtgtgtgtgtggggacaagccagcccaggtgcctgcgttttggcccagtacctcctaccctcatactacatatgtagccacccccaggcatagggttgtgcacactggtgacatgtctgccctctagaagaagcatgggggaaatgggaccccacaggccctgttagctgatacgggccatgagctcccaggtcacggtctaaaagtacattggtttggggctctgcgtgaccatattccaaggatcctgcaaaggaagaggcaggactggagaagggaaagagtgggccttctaaggctcccagggcaggacctctttttgtctggtctaagaggggtattgaacccaagtggcttagatgctgaatccctgggcttagaacccaatgccctggagcattgatctcacagtgctggccagaaaggggctcgttggttgctactaggtcattatcactcccagggcacctgggcagtcaatgaaactgagctcagaaaagtcctgcctttatgatgtcccttccacttccataactttctccataaaataaaaccaagaaaaataatttttctcttgatytcaaatcgtatttaaaggaaaatagaaattttatttttaaagaaattgcatgttttcattgtctatatattgttttgaaatatgtacacgttgtgtaatggctaaattgagctaattaaatgtataacctcacatgcttatcatttttgtggtgaaaacacttaaaatccactctcttaacaattttcaaaaatatttgaaaaaatatagttattaactgtagtcctgtaactatttcctattaattatagggaagtagaaattttaatagtcatctttctcatgcttttcttgacttttagattcaagaaataataaacttgaataaaagagattaatttcacagtaatgcaatatttctgtaaaatttcacaccttgttgactgtcaatcagctgagaactttacacctcattaaaaatccattagaacaatggctgttccattagcccttcagtttatgccttaaaacatacttgtctaaaarcaacattgtttttggcaggctgctccttttgataagtggggacttgctctggtattaactgtttccaggtctccagaaaaaggctcagggtatgtctagggacatcagtgacaacagtgaggtagagcaagtcaatactgtgccacctctgcgctagccagagaacctctgctccaaggtgagttggttccccctttcattaaggtcctcaggccccagtaaaatccagatatggctttggagaggaacgctgtctgagtgaagctccctcagtttcataaccagcttagagcttctcagctctgacctgcctgttagcatggctggggagcccagtggtttattgaactggctaataacaaagattctgagataacgaaacagaaaacaggtaggttttgatgaaaaggaaggagataaggaggataagaggggtagtagggaggaatagtgggagaggggcaaagaagcattaaatcaagatttggagaatggctggaaacagtggcagagactcaataggagagtgaccctgacagacggggaggtggcaaaagtgcttgcaggcacaggccacccaacagttatttcrgggactgttcacaatctcatctacttcacagttttgccttgtcctaactcaggtcttattagagccagaataaattgccttgcatcgtcagaaactgaccattcattcctgtggtcttctttgagatttttagaatcccaaggactaaatatccctatccacttgcctttgttcactgtattggatgatgtgccattgcctgtctccagcattcactgagagcagtaccccaacatccaacacatctttaaatgccaaagggaagtgaaaatgtcctgacttcttaaactctaacatagcattcatcctattcttatattttttgaactttgcatcaaaacatacataaatgcaggtgcacaaattgtaagtgtaaaagtcaatgaattttcactaagtgaacacacttggctcaccagaagctaaagaaagggtgaactagaaggggactttgtagattacacttcctgacaccatcattatttaagaaagaactgtttcctaggtatattttaggaccttttatctggtgatatctatctactaactttaggggtggggtggaattgattctttttacaagattagtgaagctagaaacaactagcttttaattcattaaatgtaacctactttcaagtagcttcatgtgactgaaatcaatctgttttattttccaaaccagtggaatacacacagggtcattacatacattttgaaagtcttctgtttcaaatgtattgtagattaagaaacagaatgtggcagggcacggtggctcatgcctgtaatctcagcactttgggagaccgaggcgggtggatcacttgaggtcaggaatttgagatcagcctggccaacatggtgaaaccccgtctctactaaaaatacaaaaaattagccaggcatggtggtgtgcgcctgtagtcccagctacttgggaagctgaggtgggagaatcgcttgaacctgggaggcagaggttgcagtgagctgagatcatgtcattgcactccagcctgggtgacagagcgagattttgtctcaaaagaaaaaacaaaaaatagaaaaagaaacaacgctattggcacacccagaataatcactattggacttctgataccaaaaacaagggggatttcctcgtttttaagttttatgaaatgaagtaatattctgtatactcttccgagtttagcttctttgagtaggtttgtgagatttatccaagtgtggaatggagttataatttattcatttttggttttgggtgattgtatttttaaaattaaggtaaacattaaaagttagggtttaacccactactgggtattcacccaaagggaaagaagtcattctacgagaaagaccacatgcacaggcctgtccaattcacagttgcaaaaataggcaaccaaacttgttgcccatcgaccaacgagtggataaagaaaatgtggtatatatgccctatggattactactcagtcataaaaagaaaccaaataatgtctctggcagcaacttggctggaagtggaggccatttattctaagagacgtaactcaggaatggaaaaccaaatatcatgttttcacttacaagtgggagctaagcgctgaggatacaaaggcataagaatgaataatggactttggggatgggggagagattgggagaagttgagaaataaaagactacatattgggtacagtgtacactgctccggtgatggatgcaccaaaatatcagaaatcaccactaatgaatgtgtccaagtaaacaaaacccactgtaccccaaaaactatagaaatagaaaatgaataaataaaagttagggattaaaaagaaagtgggacatggtcattccagaagtctaaaatattataagctatatataaaatacaagtttgtaactattttttgagtacctgcaatcagcaagtttgcattaatattactgtttactccctcactttttaaaacaactaattttctatttcctattttaagaccttacctaagattgctgtcctgtggaatggttcctagcccacgtgaccttgtctgtgttgaagcatgagtgaatacatactaccatctactttagtgaatgttgatgataaaatggccaatttcatgtatttgtttattttcaagaaaaccttagagcactcgttctcaaactttaggatgcatcagaattacctggagtgccagaatcccctgaagtggttgtaagaactcattgctggggccaggtgcggtggctcacacctgtaatcccagcactttcggaggccaaggcaggcggatcacttgaggtcaggaattcgagaccagcctggccaccatggtgaaaccccttctctactaaaaatacaaagattagctgtgcgtgatggcgggcacctgtaatcccagccacttgggaggctgaggcaggagaatcgcttgaacccgggrggcggaggttgcagtgagccaagatggcgccactgcactccagcctgggtggcagagacaaattgaaaaaaaaaaaaaaaaaaggagtttctaggccccatccccagaatttttgattttgtaggtctgcggtgggatccaattatgtaccgtctaatgagctcccaggtgatagtgacgctgcagacctggctccacattctgagaaccactgccttagagcctgcacatcaagtcacgtttatattcctgtgccgtactcccctggtgaggattcctctggtcattcatgcatttacgtttttaaactccttggaatcaaccaggtagagattgtactcttgttgtcgtatttaccatcctaaatcattagcatctattatcttcctctgccctacaccacaactctgcttgtaacccatttggagcgtgttttctatgttcttgctttgtttacatattggtggccccaactatttatcagcttattaaagacatcaggccactatttgtctatatccctgcactgcctagcagggagcactgcagggactattgaattcatgcactgtattctctgctggcccattgatttcatccttatagcccctgcttctcacctgcatgtgtttttttcacaatttacatactgataaaatgaattcttgcttcttgctcatgtaagaatatggaggctgggcacagtggctcacacctgtgatcccaacactttgggaggccgaggcaggcagatcatgaggtcaggagatcgagaccatcctggctaacatggtgaaaccccctctctactaaaaatacaaaaattagctgagcgtggtggtttgcacctgtaatcccagctatttgggaggctgaggcaggagaatcgcttgaacctgggaggtagaggttgcagtgagctgagatcacgccactgcattccagctttgggggccccaaaacccaggagtgagactctgtctcaaaaaaaaaaaaaaaaaaaagaatatggaagttataaaaataatctgtgatcatataatgactgttttccccaaaaagggcattactttcctgcttcaaagtatgtatttcttaactaaagtgtttgtgggatatggctgcgtgttggcatcacctagagaacttawaaaaaaaaaatgaaaacaaaaacaaaacaaaacaaaaaactgatcttcatgtcccagaggttctcttctaattgatgtgggctgtgatctgggcatagagattgccaaaattaccccggtgattctaacacataaaaatgttttagagtttcttaagtactttttttcctgatgagtttcaagagggccactttttttttctggaagattattttcagaaacacctagcccttctttatttgtatctcctgtagatgttttccttctgagtttttctctgtgaaacaagaaaatataatgaactgtcatttgcacgttgcacaaagcatgaactttatttggagtcttagataaacttgttctgatctagaaatgaaaaataatgaactctgctgagttctgcatttmctgtctgaagttagctttaccataaggatctggtgggtaagtgtttgttgttcttgtcattaattattggaacagagttgtttggagtagatgattcattgtggaacaaatcgtctgattttgagggacattttccattataaaataattatacataaaaacagaagtattgctttaatactaagatttgtaacaatgccatgtcattctggttgtaatgactctgtgtctattccactggtttggaaaataaaacagattgatttcagtcatatgaagatacttgaaaataggttacatttaatcaattagaaactagttgtttctaacttcactaatcttgtaaaaagaattaattccaccccactcctaaagttagtagatagatagatatcaccagataagttcctaaaatatacctaggaaatagctctttctcaaataatgatggtgtcagtaagtctaatgtaagtccattttattttaccctttctttaggttctgcccttgtatcttagaataatgaaatatgaagtgaaatttggtgtcatggtttacctgtagccattttataatttagattcatgggtttacattacttactgaaactactggggaaacattaacaacacaataggattcctagattgataaacttcaacactcaagctatgacagttgttctcagtctcgtctttgattcaatgtaaaaatttggacaagttaattagctttcttttgctgcgtgtataggggcaggataaacttgagaattcccacaattattcaacccagatcaaagatatttgtctcaggaaatcaacaatattaagaaaaatggctttttgaaaaaaaattaaaaaaatgtttagcaccttcaaatatcagattcacatcctcatcatcctcacttagagattttaaaactaatagcarttttgtatggcacatttgcatttacaatgcatttttgtacacattctattttcccctaaacccagggagactggaagagcaacaatttacatatttgcgtatttttagaaagtgagtcttagaaaggttaagtgactaacctaggctcaaacagccagaagtgtgtggaacaaaggcaccacacagctttgctgactgtgagctcactctttctactcctccagctatgccagctatacaatagcaacttgtgagaggtgttaggtgtgagggatagtaggggggtaggggtggggaggggaagaggaagcaaagtcctcatactgattgtatttttatcacttttctaaaggattttatgttttacagcctatttgtcattggtggaaatatctctacactggtgctataaacagcaaaacatgcacttgagactccctgcaagcccatctaagttttaagggtaattgagaatagcagcacttgatacacatatcttcatttactatatagtgtgatcaattattttccctgatactaagggaaaattaaacatcttttcattggttgttgcatttctttcacggtgtttttaatgcactttgcgagcttttgtagttctcaaaactggccactagatggtagtgtttagttagtattgtcgcacatgttccattgtgggaactttgattctaataggaaacatttcatatataatactgcactgaaactgtttccccagtggctgaggcacacgataaaaactctgtggcttgagccttctttttcttttttaatgactagacctcccttcattcaacacagacctttcttccacatactacttattcagcaattcatttttctccccataatagtctttttaaacaccccacagtgagggagtgttaaaagtcctgcctttcgtagaattttgctctaaacttctgagaggtaaagcagatctggtgccaagatgatgtgttctagggaagtacaaggacaatagacttaaagacctgtgctgccagcttgtgaataattgaagatttgtatctcgaagtaaatttcagagtacccctgtacttccttgggtatctaaaccaaataagacagaagttgtagttgcctggtatagataccacattgccaaaattttacagtattttggacaatccaatagatgtcttctctctgctttgtttaagccttctaatttccccagcaagacaaagcaaaacaaaattaattcacacagcctgtttgcatgatatggtccgatggtttactatgctatgtttgtcattagtcacccaagcacagaatctaaaagtcacttataaccatttcctgcccccccatgactgctgattcttccaaaaccataaatctcctttactaattcacttgaataaccaaacctgcatttcaggttctcattctttacacacccaataaaaaatgagatgccatctgttattttattcattaagtcaagtyctgtttctcatgttctgcgggaattcttcccatgtggttttactgtttgtttcactttcttcaatttccctcatcattacacataagcatttataaaatacctcttcataaaatccactccagtcattctctgcagttaactccaagatctccaagatcaaaacagaccccaaagttgtcaatgaaactgttcacttgcacagtgcaggggctgggggtgtggttacttgggtgtgtgaatatgaactttcggttgtctgaggacaacaggaagccttgtttctggttgctatcatattaaactttagttaagatttttattgtttatgagatagggaattttttcccctgggggtcaactggggtcaccctatttcctgagggctaaataaaattggctgcaatccccatcgtacagattgtgaaaagttctgctttctctccaaagcttttatgaatccttgatcacaccaggccacacatctctgcttcagccaaattggttgcgtttaggagttctctcacagtagctgtcatcatctcttttttccataccacagaggctcaaggtagaactgagccccttccttagttttcccaaccaccagccttccctctgccccaacaaaacaaaacttgttcacacatgggatttctgcattgtaccacactttactgatggtttgaagaaatggaagcaatgttcaccataatgtgagaagtgactgtgtttagactttcatattcttaaaaagtcagttacccagtgatttctatatggaaggtgttagccttttgctaggtttgcttgggttttttctttcattcctacccttccgtacctctcctacttcaaaaattgcttataggaactccagatttttcttacttaatggcatttagtgctttacgtctctcctgctccatccaccttttaactcccagaactacgcaagtgctcagcagaacaaaatgggctttcatgtaatattaccacaacttgatagaagatatttttggttataaatagcttttaaaaaaaattttttggtgattacatgtgggtacgatgactaaattgaattttgctcttcgtctcatacacacaaacacacacacacacacacacacacacacacacacacacacacaggcatttatatatagagagagagagatggagacttgttctgtcatcccagctggagtgtagtggtgcaatcacagctcactgcagcctcaacctcccaggtgcaagtgatcctcctgcttcagcctcccatgtagctgggattacaggtgcgggccaccacacctggctattttttattattttttgtagatgcggaatctccctatgttgcccaggctagtaactcctaggtgtaagtgatcctccagactcggactcccaaagtgctgggattacaagtgcaagcccccatacccccagccttctgctcctatttgacctagaaattccatatagtagccatagcattcattcattcaacaaataattattgaacacctacttgcaaaaaggaattcagttcctattctgttggggtgataatctagtaaataataataataataatgaaaagtgtccatgcactcttctaggctccaataatccctatgaagagagggtatgcttaaacaacagatgcttattttctcacggttgtggaggctggcagtgtgagatcggggtgcctgcatagtggagttctagtgagggctggcttcccctatgccttcacccaaagtttatgtgttattaatatcagcagccctctatctctggatgtctctggtgccttagaagacatattctctacagttaaagagtgatcctcaagaacggacagggtaaatatattttatattgctaaatgcccccatttgaagggctatataccatttcatgtagcaaggagcacttaatggctccagcagaacaaaataactctacagaaaatttttatttgcccaaagcatctaacgagctggtccttccatgcatgtggtggcactcttgtgaactgcttcctgagatcctcttagtgcaaagccaacaacattcagtacatttccttcacttgccttttggcatgtccatgacaatatttccagctgatctaacttctagaaaatctatttcccacaagcaacaggtcttctattttcctgcttaagagtgtttatttttgcttttttcagcagcttcacaacttctgacttggttgactttttttttttttttttttagagagaatgtctctcctccatctgcgaagtgctgcattttaggtttggtctgacaatttgatgcaacggctcaggtatatatgacaaggaaatggaatttctatcctcgaaatcaattctgaacaataaaagctgagaggataagtttattcaaaggtgatttggtattgcgacaggctgctccaaatcagaactcagcaacctgattttgaaaaatttccaagttcatgaaaagaatcactttgtacataagggctttctacttgtttgggtttgagcataactagatagcttagtgggatatccatattcttgcatttgatgatcacatttggcatctaaatattatgctgttttcaaatgaaagaaatactgctgaataagagagctagaatgaattacatacaaagaaaacttaaaataagtgtcatctaagaagatgaaaaagcaaacaagtacatatgttcttaacttttgggggcttgcctttaatttttttaataaggcaattatctgctattagtaattataataggagctaaaatccagttaatagtcactgtgtgtgaaaccctgtgctgagcaccccagggtatggcctccaagaggacacacaacactctttttggagaaagctgaagacagtgggggcagtgactgaaggtcacggagttggtaaaaggcagagccaagctcaaacccacacagccacatacctgcaactgtgttgttagcactgcactccccagttaccaaagccttgtttattttccagtcctaaactctgcttaaatgtgcatgaagagtaatttcattttttttccttttctagactgtaaatttgtataattggatttctacaggcttttgtgtttctggtgagattcaaaatggatttttcaaagttacgatattcagtgactcctataatctagaaatttctcccaagacaccagacttcctccctgatcttttgactaaaagcctggtccccagctgtattcatttcctagggctgctgtaaggaagtatcacaacctaggtggcttacaacagccaaaatgcattgtctcacagttctggaggccagaaatccaaaagtaatgtgttgtcaaggttgtttccttctgagaaccgtgaggcaaggatttgttccaggcctctctccttggatagccgtcttctctctttgtttcttcatagtgccttcctcctgcatatgtgtgtgtctgcatttccccattttataagaattccccttcacatyagataaggcccactctaatgaccttattttaactcgattacctctctaaagaccctatttccaagcaaagtccctttctgaggtactggggttggaacttcagcctatttttgcagggacacaattcaacccatagcaccagctctgaaccagggtagtgcatggaggtggagacctagtaccgtgctaaggaccccagccgacagtgtggtccgaggcaagtttcccttctgcccaataggggattggattgactgatttctactgtaatatagtacaagtatatatagtagaagtatatatatagaagtaacatagaattctatttttatagaatggctgtaatttatttaataggttttctcactgaagtaatttcataaaagtttttggaaagttggcttcatccttctactttcatgcatttgccgcagagattaagtgtctgccaggtattctttcagcgtgatccaccggggaacccacagacccagcctcctcccactttccttttccttctgagatctctttattcttcctgttctgtgtccaaaaagaggaaccaactgccccctaagtctatcctcacatatagagcctcttacatgacaggtgtcaggagaaactaaaaacgattagacttagaaggagctaactattaaatggtgaatgctcaatcaatattcattaatcaggaaggttgaccattgactttaccctctgtgacttcactggctctttcacagcaacgattcttgagaaaatacatggccaagccttacattagctgatctagttttcagagccccgctaggatatgagtcctggtattgcagatgaggaaacagggtctcacagatacacagaagctcctctgggtgcacacagtgagtactgggataggcaaaggctgaactcaggcagcttctctccaggatccaccctgagtgatgagctgtgtcccaggctggagaagagccatgctgcccactgtctgggcctatctacaagctctttcattcattcttggatttttccagctgaaaaaaagtgttatatgaaggatcagagatggcatcttaaacttttttttgcacaattcatcattaattcactgttttttaaactgttgtcacaaagagttgttttgaatgccttgatgaactatgttttgtttgttttattatattttcacttgagatttttactgtgaagcatgctattttgaagacaaaatttttaaaaatagagaagggcaagaagaatggtggacaatgcaggaggtgacaattggtataattacagtaaacatttataggtcagtggaacataagccctgagggaaggctctgaaagcggacctgcaagcaggagggagggagggaaggagggaggcagccctcgcaggctgccgggaagcaccagggatgtcgtgcctcactgtgccagcctcacagatggcatctcagcgacatggctgttcttttgtcttttcttcatgagcatcttagagaagcgcatttatgcacatttctacctacaaagttttgcctcagtgtgactcatcttctttctgtctcagataggattactcttcaaaggaaagataaaaaaacaagttctgaatataaagatgaagccaactgcagggcttgttgaattacctcagagatagctagagttgtctgtgtgtgtgtgtgtgtgtgtgtgtgtgtgtgtgtgtgtgtgtgcgcctctgtgtgtgtgtctgtgtatctgtccatgtctgtgtgtatgtctgtgtccatgtctgtatgtgcatctgtgtgtgtgcatgtgcctgtgcatgtgtgtctgtgcatgtgtgtgtatacacatgagtgcaatgtcccatattggcaaataccacatggtaacgtcctgcacgccacaggagctgtatatatgagctgtattttcatgatggcccactgggatagggattaaatcagatgatcaccatttatacctaagtagtaacacttaaaaatgcaattgctctctgtcaccacggcttaatctatgagcccctaaggggaaaaaattcttacattaaaaaagccatttcatatatagataaatgttgaataggcaggtgttgatcagaaggtctaatccccatccacgtgaaatgaacaagtcaagcagataattgttttactagagctttcctttgcattaaatgtgcctggaaaacatttctaaaaccattcttttctttttggttgaaccattatgaatgaatcttcatcctttaaaaggctagatgttcatgttcaactgttttggcaactgacctaaaccaatattattatgaacacattttggttgttttggttggacattggtaactgccagtgaagttggaggtgagaggagttaactacttccttataatgtcaccacctaattagaataaaagcatcttagattaaattctgatttacataaggacatttattaactaaacaattattcagcaggcatgaaataaacaaatcatatgactagttctctctctaggtgcttggccaccgtttgcaagcttcccttaaggcacaaaatccaaaattccagagtcaatatttcatcatcactatagacaaaagtttgtggtattcacagctggacgctggacatctcccaggacgtggttcctgagtcattctgcctctgagtgtgttgctcccatggaaatcatgcacctccacggaactcactcaggctcctcggggactcctgagtctgcagtcagattgctagtcttgctctgatttcctacctatcggacattccatttgactgtcttgccactgaactcaatgggtgtaagctgactcttcttccctgcatatcagcatcctcctgacttccccacttctgtgaatgtcatgatcattctttctgccacctaagcttgaagcctacagtcattttttaacacagccaccttcagctccaattccaattccaatcagtcactcttttctcaaatctcccttcataccagttcctgtccttctgtctcttctaccctaagccagagccatatctctgcagatcaagggcctttttgttctgtttcttccccagtcaattagtttacatgatgccaaacccatcttcttaaaaccacctggattagatcactcctctgtttgaagatttccaaagaggccttattttgtagtggaaaatgtccaaactcctttgcatattcacttattctcagcatgcttttaccaccttgcgttcttctccttcacggcacaaacctctatgccagctggattttccatccataatcccccaaatacatcacatgcattgttgcattggccacccttgttagtgctttttccatgtggtgttcttactttcctccttcactccatgcccacttcctcaaaacacacacacacacacacacacacacacacacacacacacacacacagcttcttggagcctcaaagttggttgctagtattttaagtgcccggaatttgaaatgaaaaaaaataaaagtaaactggttttaaatgtaggcgttgccacgtattggttctactgtggcctcagacttgttatgaaatatttccaagccttagcttccacatgagtacaatgggaataatgcctaccatcctattgcccatccttaattaatcttagttccgtttctgtgccacgtttcctccccagggaagccctttatacccttactactcatggatttatctcttctctgagcccatagaactgagttctgttgtcactgctttagtaaagtcaccatttgcttgtttaaggtccctcttctattttcacttattgtgtttcggagccacacattgtatcctatactagactttgaaaatactttagttgcagtgcattatttttgtgtagtcagagtacccagggcagtttctcacacattctctcgttttgtctcataacatcccaggagctggatataatctgtgatttatgaggagagaaagtgagagacagaggtgtaagtgagttgcctaaggtcactcagagagtgagtggcagaagcagcacttgaatcaagtcttaggattctaagcccggggctgtctgctccctcctagacctgtaactttagaagcaggaatttatttcatattgcttatatttcagtatttatttttaacccttacagggcccggtcttgtgactgactgtaattgagaaggtactctacaaatatttttgaaagaataaataaaatgaatactacagaccatgttaataatgtcaaataactctgggagtttgagggataattctgtcaatacgagttgagggtgtgcttggcctctccatcatttaccctgcttttatgagggttagcagcacaatgtcttcattctaaaacacagaatcatgaggttaaagaaagcatgcaatgccatcagctgagaagaaccagaattcacagtgcaggttctctaaagtggttttgtgttgctctcagcgccgtgaactcccaccattatattcatagctttttagcctttggctaagatcaagtagagtgtttgttctcctggcttttaataagtaatgtgttctccatccaaggacaacatatttaggctgtacatgcattacgaagtattaagctcctgtaacagtaaatttctcaacaggagatttatgtgaattctcttggatgttattctgttgacattaggaacaattaggaatataaaatgccatggcagatttttctgtgatgctggacgtactgtcaggactctgagtctgtgtactcggaagtcttcctcagacagggacaaggcgcattctctttcttaggaagagaattaacagtgcactcccacctccctgtgctcaccacatgggcacacatcccagggcgagggtggagtgagctcagaagaacccacgctgagcacaatgaaagcaaaattattatcagagaaagaaacagattgcagcaacctgggtttaacaggacacatagtagtagacaggaagtttttcgtgatctataacacattttcatattagggtcatgttaatttcacaatgaattgcatattaggctcaattagagaaacaataaagaaggaagacgggatgacagaaagcattgaagaggaggaagcagaatggaggcagagggtggaatcaaaaataaggacaaagagaggaaggggaaagagaaagaaaatgagaagtaacgtcagcagctccgtaggttctgaggtgagttagctggtcgtaggtcaacagctttagtcacacatcctgttattcactttgggcatcagagcacattttcactaccctttgaaatttccatacagtctacagcgattttgtagcaatctttctttaccgggaaattgcttatctgcttttcttttcaatctttgaggtcaacttattaaaggctttagtttcacatgaagcccgaaatattttgaaggtaagaaaaaaatgtgcctttggtcttaaatatttccacttaaatcttgattctgggctactttaataattccaaaataagagtgagtggcttcttttttcaataactgaaatacaacatttaaaaacactcatgtaattattttgctgtgttcagttgtttgaaagtagacaaggtttgatttgacagagctgtgttttaacctgggctctacatgtcactaaactactgtcccctgtaagctcctgtttcctcgtctacagatagaggtactccagtagctctccaggctctgtgtgtctctgtcacaggtttggcataaagtagacaggaatggtgtcagttcctccctccccaaactctctccaatgacactcccaccaagtgcagaaacgtacagaaagaactcttcctgcttttcaacttccattgatcacactgaaagaaatatcacattagcttataaggctcaaaattatcttcagtgctatagctctgtgtactctaaaatcagagcaacataactttggttctggatgaaatcgaatcaggacctgactctactcctagaagaacgctgaccccaaactcctgttttgcagaaccctgaaggagcaagtaaagatgccagccattaaatatgaagaccttcagagacctagaactaatggaactaaatcaaggatttctattttatcttagattaaaatgccatttatatgcattcagggcatagttttcactcccatgaggaatagattcatacctgtataaagctgggaatataatgactaattaaatatactgtatgacttcaatatagccaagaaaattacaatcattccaagtaatactgtttttccccagacacaaatctgaggatcttgaatcttagcactggaaggaatgtagacatcacgcaggctcatcacttctctggcacagaacttgacttgccttgagcacatgtctggtagcttcttcctgggaacatagatgacataacgcatattgcctttccaggcagcttgatctgtcatgagacagctctggccttttagaaaccagcctttatactgagctgtgagcctgcttctctgtattgcacattttttgttcttaattctgaacaaaaagtttttgtgaattttcttcctggaaatggtcttcaccacttgaaacaactgtcatgcccatctgagcatatttcttaggtgaggcttcccagtttgggagacgcttctctcataaaatatttctgaattcatcagtatctctgttcctataaaacgcgtggctgtctacttcaggcaaatcctaaccaagctcaggtaacagtgaagtgattgtttgctgtgaaacagtattgtactgttgaagttaaagaggtctatgattacattgtgtttattttggattttgcattattgagtattttttactttattttctttttgtaaagcccatatcactacctataacaagcttttgataagtgaactttctaatttttcctattctatagctatgtaagggaatctttaaattttgccaggactttctagcctaatgcaacaagggaggttacattaactataataatttaaatttcattagttttttcccacatttgctgaagcaattcttctacacaatctatttcattatttctgggagttctaaatgtgtcccacaggaacacatcccccttcttggaaccactgctcttccaccagaaccagcagctctctggactccccaaggcttattaggtctcattgttacccagggagtcaagcagctatcacaaggccatgctttggctttgtagctgctccaatggatgttaaaatttctcactttgttcctgatactgtacggaattatatgcaacatctctttacttaaaagctctctgcttctcccaggatccagagattcatccctggaaaagcattcaagtgcagctgccatattccatttagaatgcctccttccttcagacagccaaggttttgttattgggctcagctctatgtgcccagctccttcttcagtacaaggagctctctccaaagaggtcactaaatcccctgcaaatagtctttaactagaccttttcaaaccttgtctcttttttttctttgaaatgacactgtaccatgaacatttttatgaaatcattaaacatgttaaacttcatcaaagccatcattttaaagtcttccatgatgtctatcttatagagatacaccatactagaatgcatttttttcatttttctattgctgagaatgttgggttttatacatagcttgttattttaagtaaatgttgtgctttaccttgttcctattatacttttaattcagcctactgttagcatctgtggatgattttctatgcttatatgtcactcaatatattagcatcattcccagcttttggctttacatatgcatttttaagatgtgtctcttaccttttaaccatcaaatcagattttagttgcttgatagacccagcttttatatttcagtttatgccacctctaaggtcgttgtagtgagatgcctatataaaagacatacaaattcaaggagtgaattaaaatctcacttgaaattttaaatgtcactgaatattaattgtggtcgctaattggtatattttctagtaatcacttcaaaagctcctcattaaaaataaatcataaaaatatagaattataagagcttttaggtatagttcaatgatctaattccatccatttatctgtccatctatccttcagcaagtcatttatcaccttccttctgtatattacagatgataataaagacatctgggacaaaaaggtaagtcacagacctacccatgtgtatgggtgatagagtagtgaatacaagtgacaaagggtgtgattccttctgtttgagaggtgaagaaagtattcccaaagcaagtgacattgaatcagcaccttaagataaaacgaagaactcagcagaaagaaagtgaatgggaagatgtggtaataggtttaaatggacatggcatgtcggcaactaaatttctgtagctccagaatattctccccagtcccctgagacgaagttacagagctgtgaatccggtagtgaaagccttggtataaggcgcataagaaatgtgcagattatctaccatgaaatagaggaagaaatcaaggttattcaagtagaggaatgacacgttttagaaagacttttgttataacgttatgggaaatggattataggctggaggcaagagataagacattgtcagtgtgacagaatattttattaataaagcacataatttatactcagatctatgtgagatgagaccaattcatgtcaacatgtccaatgtttttgaaaaaatgctaagtttttattatcgcttttgtttatttccctgtgaaatatagtaggctagccctctatttctcctggcgaaatctttagataggtggaaaaaaaaatgttgaaaaagggcatcaatgacctcttttatcttggttttatctgccttttggaagatacttgattcaaagctatgaaaaagcatctcaccaatcccgtatttcacttggttggacgatgtgtcaagagaacgcctgaggcttcctctgtccgttaacaggccagtcatgagtcacagtctgaacatgaggaaatgttcatgtactttttcatagtcatggcaatgagacttttttgtgcccaaagtactatcctcgcctaaagtccctgttaaaaaggttattttctgccacaggcaggtagcagaatgtcaagatccaattccaagtgcttcatcatcactcggatagcctcaggaagctgaggttttacagctgcctggaacccacatgcttcatgtgatgtagagcagccctgttaattagctgtttcaggattcttaatgccctatggctttggaaacacttgttagcccacagagggaggggaagagctggaagcaattggactacagcctgaatttattttaattcaattcagtaaccaccttatctttctaaatccctgtttagaatctgttgaaaattatagttgatttaagtttttctcagtgatgcatcctgagagaagagggagattacaattcaaggttttctgaagccacagaaatgtggagtgctgcagaaagagctgatcgatggaactttccagacacatgtatgcaattttctaaaggctagaaaatagatgccggggatggggagaggggaggccagttgatgtggaaaggcttgtgtagagtgcccacgagtctgcatttctgttcacctaccagaagaaacactgccagttccccccaccctcaccccccaaccattctcactgcagagagctggcactcaacaaactcataatttttctcaatacaattctcatgacataacctgaccaaccatatgaaacctaatgaagaaaacaaccattgccattggcaacaaatgcaggagttgcatcacaagtaaaccacatactttacttcacaaatttgaacattagagtaccaccggcaaaaacatggtaccatccttcggtatggatgagatatcagtttacaaaaccttcactggaaagtccataccaaaatttttaaaatgcatgcaaaagctaattgtgttgacatctttcttatcagagctattgcaaattattttgtctagaggtggttcttaaaacagccacctgtctgtccactaatcatgtacatagcatcctcttcctcatattcatcctctgaaataccaagaggtgaaagagtgtttcagtagctcaccattcttggctgttacataatgggtcagattcctttctgagtagtaggagaggtcagtgatccagatctatatatctttgtgctttttccactaatacattcttagaacctagtaggtgctcaataaacgttagctgtatgaatgagttagtgaatcaatgaatgaagtgttaatttttagaaatattatggtcagaattttactaggaaaaacatttcttataatcacaaatgaaagctaggtttactcaaaattgggaatagtaagtagtctttccatttcccataccacaggtatgcttgtattcttcttatatgcttatgaaagaagagaatgtggattaagttataaactatttgtacatgatattgtatatgtaaaaatcatgtcagttttgaggccaggatttctttgtattgagtaaaattttcctaaatatttgcccattgtattagttcattctcacattgctgataaagacatactcaagactgggtaatttataaagaaaaacaggtttaagggacttacagttccacgtgactggggaggcctcacaatcatggtggaaggcaaaaggcatgtcttacatggtggcagacatgagagaaaatgagagaaaaaccatgaaaaaggggtttccccttataaagccatcagatcttgtgagacttattcactaccatgagaacagtatggggaaaattgcccccatgattcaattatctcccaccaggtccctcccacaacacatgggaatcatgagagctacagttcaagatgagatttgggtggggacacagccaaaccacatcacccattttaaaacaggcttgatatcaatttattgctagaaaactataatttgtattttcttttacatttttaatgactgattgtacatttgttccctcaaaagaggctctccaaaatactgcctaattcctatgttaatagcaacccaaacatgttttcaatactaatattaaaacaaattagcttaacaaatacaaaaggtaatgcctggtttatacaatacggatttgagaaatgcaggtttcaacctgttccacaccatgcccttcattatattcttctgccagagattttattctttacttttcattcaatcagaaagaattgagaggaatttgaacccattctgcctatttagaatatcatttgtactgactttaatcttttgctcctaatccatgaattcctgaggtcttttatttacatccataaatttgaaaagcacaatccccttttttttttaaaaaaaaaaaaaaggaagttacttttgggaatcagagacatgtacctctttgttctcttggagagctgtgggttatgggagggaactcctcatcctgtttcctgatatgcagtgacttctctcttacacagatgagtcctaaaacctttgtgagctcagacaagttggctggttttatttttatttttttatttttgagattgtctcactctgtcactcaggatggagtgcagtggcccaattaccaactcactgcagccttgaccttccaggctgaaaccatcttcccacctcagcctcccaaatagctaagaccacaggtgcacaccaccatacccactaattttttgtagagatagggtttcgccatattgcccaggctggtcttgaactcctggtctcaaccaattcacctgccttggcctcccaaagtgctggggttacaggtgtgagccaccatgcctggccaagttgcctggttctttacatggaatgttctttacatggaatgttccaggatcaattaaacacagataaataacaacttatgttttgtaaataaacacatctgaatggaatcttactccaatttagatagaaattgatatttttcctttcaaatgaaataaatgttttagactaggacatcccaagtgaattgaagattggtacaggagcctgaggaaggaagtttaagagagtgaaagcatgagagaagagccaagattatgtagcccagagaaggaaagaattattacctaccattactttaagggactgtgcttcctcacagtagtggaagacagatgctcattttttattcaagactgtgtaaaataaatggccttaatttatagatgtggatgctggtttatatcaatacacctcaacctgggatggctccaaatcttgactacacatgggaataacttgaggagttttacaaaaaaactgatgcctgggtcacaccctgagagattcttatttatctggtctggggtggtgtggcccaggcactgaaatttataaaattctccgggtgattctaatatgcagccaaggttaagaatgcagctgtacagctgtagatggaagaataccaaaaccaggccttctgctagtgcctgagcttctcctcattttagtttctgtgatgtgttcagacattgtttctagaatctcctgggtaatatgagttatagtcctttggatggagtaatacattaacacatccatactcacatagtttggaaggggccaggatgcaaagggaagttggaggaggaagagaaggaaatggtaaagtccaaagcatgggtgaaggggggccaatataaacccacagagcaaaaaggagatgttgggtcatcatattctattacataaattggatttacatttccttgtctttcattgctggtctttattcccacaagtctccaaatacagtcataaaattctcatgagttgttatagcaaaattgcttatcatttactatttcttaaatgaatgcataaactgtattactttggcagaaaggatgctgctgggtatcatatgtaatgtatactagtaaggtggacaggaccattaggactttaaattcctttataatctcaaaagtctgtgattctgatcttcctggtcttgcaactccagaaaaggtggtaatcactggagtaggctatttatgggcctgtgagatagtgaaacatgctattaagacaaaatgagagacttccttctctgaaatggttccatataaaagtaatatatggcttaagtatccaggggctcatgtaatctctccatgtcagtatcttttacggggaattatttaaccaaacatgtattgaacacttacgtgctacactaaaatcccagatttgtcaagttcccgtttaaaaagtgggtactaagcctaagatattagcaatacttgtatctgaaaaggcctcacatctagaaactataaagaacttctaaaaatcaatcaaaacaacatagttcttagaaaatcacaaaggaacaggtttttcagactcgaggatgtctatatggtgaaaaagcagcagtattttagagttggtctgaactgactcacaggaacctatttttaaatgtccagaaatttgctaagcaaattgttaatgcatcaattatctaaagtttaattatgtaaacttcaagttatctgaaaaacataacacatactcaaaactctcatcccttcctaagtgttttactacattctgttatttctgtttgtgaggtcatttgtttattgcatctgtatgatggaaacactgtataaaatgacatgttattcccaactccacataggctgatataacgttggtagcttaaaatcagctttagtccaggtatttatacaatggaaatggaaatcagcatacgccacaaatcaggagttgatttttttttttttttttttttttttttttttgagatggagtgtcgctctgtcgcccaggctggagtgcagtggtgcgatctcggctcactgcaacctccgcctcctggattcaagcgattctctgcctcggcctcctgagtagctgggattacagttgcccgccaccatgcctggctaatatttgcatttttagtagagatgaggtttcatcatcttggccaggctggttttgaattcctgacctcgtaatccacctgccttggcctcccaaagtgctgggattacaagcatgagccactgcgctcggcccaggaattgattttttgtttaatggtgttgactgtctacaaactgattaagaaaatgttattaaagttgtacatcatgtctgcaaccattaaattgtaagtagcacaaaaaatctgggggaaacagtcttctagactttccagatgcagcaaagaaattgccttgttccaacatacatttttattgtttcacttttgtcttacttaaccactaagtaagacatagttcctacataaaccaatcatgtaggaattacactcctttttcaattacaactttggtttgattacctttgtggtcttctgttctatcaccgtctttttttttttttttttttttgagaaggagtttaactcttgtcacccaggctggagtgcagtggtgtgacctccgctcaccataacctctgcctcccaggttcaagcgattctcctgcctcagcatcctgagtagctgggattacaggcacctgccagcacatgtggctaattttgcatttttagtagagacagggtttcaccacgttagtcaggctggtctcgaactcctgacctcaggtgatccaccctcctcagcctcccaaagtgctgggattacaggcatgagccactgcgctcagctcaccatcgcttttagataaggaaactgagccctagagagtggttggctcgcctcaggctccaggacaaatatgacttaatcaaaactatactcctgttctttcattcacataaaactacttatctaaggatgctgcagcaacactgctgtcaggccagaattcagtaagtttacagctgaggccttatctatagaccattgattttgctcaaggaaaaagttacacaaactagcaatagagtcctgaccaggcattacaaattctacactgatgtgtaaaagagggactaggcacaaagaatacatgcttagcacaatctatctttattataggaaaagcaatttaaaacatattttactgagtagtgccagaaaattaccgaaaaagaaagttaatgctttttccttctcaaaacccttctataatgtgtaggcattgtcatattagagagactcctgggaaatgcttggtcaactaaaattgttaaagagctaaaattgaacattgactcagaagcaatgtgaaatacatcttcccatttccaggatggagtgcagtggtgagatctcagctcactgcaacttctgcctcctgggttcaagcaattctcctgcctcagcctcctgagtagctaggattacaggtgcctgccaccatgcccagctaattttttaatatttttagtagagacggggtttcgccatgttggccaggctggtcttgaactcctgacctcaggtaatcgacctgccttggcctcccaaagtgctgggattacaggcgtgagccaccgcgcccggctcactgacgctcttcttaatttcttctgcctaagaaatagaaggtattctcgagggaaaaaaggcattgacaactagtacagggaaattgatgacaacataaggctgtttgaggaaaaaacgtgggatctcaaagactgttggtgggagtgtaaattgaataatctactttggagaacaatttggcagtttctattaaaatttaaaaatgctgatatcttatcagttaatcctacttctaagtatctattattaaaaaaaatacttggcatgtattcccaatgcgttttgcaagaatgttctttgtaattgtcaaaaggtggaaatctgaatgccctccagtagggaaatggctaaatgaaatatgaaataaccatactattgaatactatgcatcagctaaaaatagcaagagatctttgttgagtgaaaaaataaattgctgattgatcattaaatataacactatgtttttaagaagcctcagaaaacagtaatatatgatcctataggcataaaattatttatgatatcacacggaggtctatagaatttattgtcctctatggtagccactagccacatgatgctatttaagtttaaattaataaaattaaataaaaataaaaatttcatgtctcatttctacgagcctcatttcacgtcctaatagcaacatttgaatggtggccagtgtaatggagagtgcagatctagaagaacaaacacaactggtaacagagttacctgggggaaggttgagtttggggatggagggctacagaaactttagagttctgcagaacttttaacatttttacaatgagaatacatcatatattatctagctaatttaaaacaaatacattgttaaaatgaaaagcatgcctagccaaaggatttctttcttttttttttttccgagacagagtcttgctctgttgcccaggctggagtgcagcggtgcaatctcggctcactgcaacctccgcctcctaggtccaagagattctcatgcctcagcctcccaaatagctgggattacagcatgtgccaccatgcccagctaatttttgtattttaatagaaacggttttcattgtgttggccagtttggtctcaaattcctgacctcaggtgattggcccaacttggcctcccaaagtgctgggattacaagtgtgagccactgcactggcctagcaaaaggatttctaaaacaatgtagaattttagtagatagatcagtataaattgatttgaacaccctacctttttagcctgttaactatctaaaagcataaaaaatagtaaaacaaacggcaaaatcatttcctccttccttttctacctgtgtctagtgtctattgaacacttactatattcccagcatttaaagtacaagaatcatgaggcaactgctgtttagactgaagtgttttcaccaggggtgtatcaagaggatttctttgtcataggttgatttcccttataactgattgattaaataattactagttggcttatgcaatgtttatataattacaggatataaatggtggttattagcctaactagaatatatgcctttataatattggtgtaatattcatatgtattttactacagcttaaaataataatttcagaaagaaattcaaattgattttcataatttagcaaccatttgagctcttccaggtcagaataacttcttgggaagccccagaaagaaaagcatatacctgcttttacagttatccatagattgactataaggctaggtattgagttggcggatgcatactttcttaattctttagataataggtcaatagtgtggtagtgaatcttgatggtaagtgtccttcgcatgtttcatactgcacagtagactagactgaaagtcccaggagactgtgagtgtagcaaagaatgaatcttgtatccccagatacacaaagaccatgtcttcactggacccacagaacctagcacatggtgtgtcttattaaatgcttgtagaataattaaataaattacattcagaaaacagtctataagtcttaaagtttacctttcaattatgtaattattacttttaatttataatttattaacagacatagatattcacaacacctgcaaaagagtttatttcaacttcttttttttgtctcatctaaaaagtgtggatttaatatagcaaagtttgcttctagaatggaatcttttagagtgtatatgcgcttttgaaaaaaatggtttatgattttgttatgtaatactgttatataagttattttagaaattgcatgatttattataatatcagcagtgaatttaaacattacacaaatgcctgaatataaagaaataggatcacctgtgtccaagttaattgccttcttttgctgtattcattagccatcaatacctacataatctaaggccaagatacatatggagcaatctatggacaggcaatagcatcccatgggagctttggaaattcaggagctcgagcctcaccccagatgtactgaatcagaatctttatgttagcatggtctccaggtgatttgtaggtccatcaatgtttgaagagcacctgtctggccttcagttgcctttatacatcttcttaccaacagtaccatctagtccaatatttttctgtcctgttagtttgtccatagtctcccaacaggcttctgtccacaaagctgttatttagaggcatggccccatccctctcatagtctttgctaaggttatgtcttttacatttggagatacaccaattgcagaggagggtgaaattagcctgagagcaggaccataacaataacctgattctaatggaggctgttaccagggcagccagtacccgaactaagtcatcattctgctggaagcattccgtttggctgcagttcaacaaaaagaaaaaagaacgcactccagaaaatcaggaaggtttgcattatctatcagctatgttcaaggagatgtttgtggaaagtcgagttaagggttcctggaaacattaatctctggacatgctggaggatgcaggtggatttagagccaggcgagtctacattcacaaatcacattaacatattaaaagacggagagctcttactctgaggagccccatttagttgtattcaacccagctccatatattttttaaatcacaaaatgcttttttttttttcgtgaaacattcattaaaattaggcaaaactcatcttcggtgagacatgctttgtgaaatgtgagtggagaggttcctctgaaattgtctaaaaggtaacttaagccctgatgttttagaaaatttgacttattatgtaacagtgaatatacctatctgtgtagtttcactattttagaagtaaaacaatgctttgatttcaaatattaaattaacttaggcattgctctcccactccatctcccaagctgtgactcagatatcagaacaaattttttacctagttagggaaaaaagtttcccaagtttcagagccataaaagcatcagtaaagcacctatttattgtagcactctcttgttttccatcttcaatttcctaaacattgaatatcttgtttttcatttttcttctaaaagcatttgtggtatataataacaccgcatgaaagtggaagagactatattggctcaggatgcacttgatatttgttttccttaaatgacaaatgaaactcccaattcaacactaggataagattttttttaagttattaaaccttagttaagttatatgacttcatactgggaaagtgagttccagagaagtttaatgaacttgttgaaggtgactttgctaacttattacaaaatggggaatacaactctggtttccctaatgccttttgtaaagcatcccagataaaaatctaggtttcagaagattccttatagttaggtatgaaaaaatgttatttctgaaaatatgatttccttatgagaaaccattgtttagatatgtttaactttagaaaaaatttccaactataattaaaatctatgaattatagacatgttcagtgaaatacactgtctcatagaaaccatattcaaaaaacagaatgactggaacagatgttatgtatggggattagagggaagttatccagttatattatactaatttgagaaagattccaaaaaaatcctttcttgggggccggtcaggggtgggtatagcaaatgaaagagaaagataaggaaatgtgttccttggtgttgagttttgaatagatcactattgtgttatattcctctgaatttaggatacctgttggattttgttccttatcatgtctgttatgtggacaaagacaacaaacgtttgtttcttcttgtcaatttcattatgcacaaggattctgaaggtccacccaagatctttcgtgcactaaatgtctggtgtttgtaatacaatgaacaattttggggagtttgaaaatcttttgattatgaccttgaggattagagatcatttggtgtggatgacttcgaggaagttatttaattttttttttgtatgtcagttttctcagatttaaaatgtgggtaatagtaaccaccttgttagaatgattgtaatgatcaaaacatgtaataatgcaaagtgcttatgcttagtgcactagtgttttgcacttacatctagttatttttttctcagtaattcaataggctaagggatgatctagtacagattgagatatgggatttttgttgttgttgttgttgacaagttgcagacaaaatgtttggttattcctctcactgaaataaaacccagaaatatagggtattataatatgttaaacatttagtggctatcaaaacttattttcttctttgaagtcagagtaatatttagagagggcattctggggtttccttttagcaaaataattagaagtaatttcccttagaatttttagaatgactatattaggaggaaagggaaggttcttacctaaattgtattgcaacttttctctgaaataaaataaacatgctgtgttaaaattgctggtataggccaggcacagtggctcatacctgtaatcccagcactttggtaggccgaggtgggaggatcacttgaggtcaggagtttgagacaagtctgaccaatgtggtgaaaccctgtctctactaaaaacacgaaaattagcccggcatggtggttggtgcctgtaatcccagctactcactactcaggaggctgaggcaggagaatcacttgaacccagaaggtggaggttgcagtgagctgagatggcaccactgcactccagcctggacaacaaagccggactgtgtctcagaaaaaaaaaaaaaagaaaaaagaaaaaaaaaatgccattgtaagttgtgccctataaaatgttaacgtttctttcaagtgaaataatgacttactatttcagcagagatcactctaacatttagttttaatctaggaaaaaaaccccatataactagatttggtctttttattaaaatgaattgatcttagaagagcacatcatatgctcaaaatatagctgtcatgtaaatcaagacatatatttgttttgttcaatgaaatctagaaactcttaaaaaaactgtttactggcttttgatgtttaattgggtggaatgtataagaaatatctgatgaatttttgacttctctattgacttccaagcttatatacagccaatgaacaaacttttctaagtcttgtactctctttccatttctacacaaattcatattgaataggaaatattgaaataagatctttagaatcctcctcttgcaaattatagaacatattaaaaccaggttaaacttatttaaatctctttatatattgtttacccacctaccacgtaaatgttactgatttttccatagtaaaaagtctaaaaatccaatgcatcttacctcccctaaactacctatctctccaaacctctcattattcctccatatgtaccttctttcaagacttaattcaagccctgccttgtttttgagttattctctgtctagataaattattggtcactccttttaacccagaaggcaccaatcatttctattattaatttgattcttagtatttattttctttgttgggagttttatttatattcccttctaaagtagatattttacttttttggaaatctctgcctactagcccagtacctaataaaaggtcaatgatgatgatgatttgaaaaaccatgttctacagtgttcagatgtgcttttagataaggggatgatataactttatcatcaaactttataatgaaaaataatcatgatgaaaatttaagataaaataattttagaatatattatttggctaagtggaaaactatcatggagtttaattaaaatttcttcatattgaaagaagacaggtatatagaggagaaaaaaacataaaaacaaaaaacatctcaggaattccaccttcagctgcccttacttcaataccatgcctcagaaagaacttcatgacttggcaggtttacaggttgactcagtgtatatgctgagaatagccaagggcaaaatttagtgttaactagatcaagaactcaggggacccaggtgtctactgttttccatagaaataaccataaacaattttaaatactagatctgctttccttttgggtttgtataatgtagagtcaaaatagaggctctggcacctcatagacacagatttaaatcccatttatgccattggtaaactatatgacctctggcaagttatttaacctccttatgccctcatctctaaaattgtagtacgaaagcaacaccctaagtatgattgcaaggattaagggaaataaaatgcaaagttcctggtacataattgatatctactaagtgtgaatttctctaagttcctcatatcacataatggtagatttttatttactgggtggttattctgtaccaggcactctcctaaacacttatatcatggggattaacacatttaatccttgtagcattcttttgcaatagctactatcatcatcatcctcattattatcgtcctatttcacagatctggaactgagccactgaaaagtaaagtaacactaactagtaactagtacttctggggttcaaaataaacttttcatttctaaaattaacccataccttcttatccagtagacaacataacctctcccactatcaggtcatttccatggcctatatcctgtggacaatttgaaagcgatttccttttaacccttgtttatctaattagaacatagtttggagaaacatacaatgttttccatagctgagtataaatcattttcttccatccttttgaattagccacatcattgctctctttccattgtgggaaatctagccttgcttgtttgtacctagacaaaagcacactttttgtgtcagaacctgtgaaaattttatcttccttgttaccacctataaatgattaatgagacaaaacattttcaaggattccaaataatctaaaaaatcccacaaattttgaaaatccacaaagaggtatctaggaaaactttcatgaagttaagagatgttatctgctgttctaggcgtgggtgactttatcaaaacatttcgcccactttcaaatttccacttgttaaaacctgaggccttatttggctgtcacttactgtacagtgtttttcagacaagttcctggcagctaattttaaagagattttgtgaaaaacacaagctgtggagtgctcctgttggaagagcaccctctgaccctctgccttaacataagaaaaaattgccagtctgtccaaacctcacccacctttggttatcttcagaatcttacaatttgtgtttcctaaggcagcaattttcaagcatgactttgaaacactgcaggctttttcaagttatttcaaggactggccaagaattctcaaaacaaaattaattttgtatttttaaaaagcagtatgcatatcatgtatcatttggcagatttaggaggttaacagtaagcattaggaaattgaatcaataataataatgggatatggggacctgtaaagaaactctcaatcctgcttcattacttttaatggcaaaaactgtaattacttttgcaccaaccaaatacactgaaatcctttaacatacaccaaagcaatgggagatctgcagaatgcttttgtccatgtttaaccataatgatcaatgcattttgaatagaatattgttatatctactatttagcttaattgtgatcattaacaaagtgcccagactctctgaacattctacatggcatactatttgtgagaagatcagcatgtaaatagtttactctttgtaagctcttctacaaggtggctaaaagcaagaactagaacccagagtcccttgcattcaatgaatttccctattattgcccatatcattctttcttttctttctttctttctttctttctttctttctttctttctttctttctttctttctttctttctttctttcttctctctctctctctctctctctttctttctttctttctttctttctttctttctttctttctttctttttctttttctttctttccttctttttgagatggagtctcgctctgtcgcccatatcatttttagtataatctcttcctttacttggtcactaagaatcacttttctctacttagagccagacatttaaatatctccagcctccaagatctcgtctgggtacttgggctgcactttttcatgtcaatcattttgcacttgtcatctatcctattaggctataagctccccaagggcagatatagagacatagtatcaagctaacctttttatttatttatttatttatttatttatttattttgaggctgggtctcgctctgtcatgcagtctggagtgcagtggcatgatcatggctcaatgctgcctcaacctcccaggctcaagcaatcctcccatctcagcctcctgagtagcctgggactgcagacgcatgccaccacactcagctattttttaatgttttatagagacggggtcttgctatgttacccaggctagtcttgaattcctgagctcaagtgatcttcctgcattggcctcccaaagtgatgagattacaggtgtgagccaccacacctggccaagctaatctttaaatatcctagagcacccattatagtgtctggcaaaaaataaatgcccataaatgtttgttgaatggaactgagtcttcagaaactagagattttttctaaaatatttttttttgccatttcagtttaatacatattagtttttctcacttatcctatcatctgaattttttatttctttgaacctgaacaggctttgtgtctacagactgctgagcctttaattttgttgtcgtttgttttgttttgttttgcacaaaactaaaaacatgtacaaatacatttttaattgcatttgttcattctagtttttactcgtaaagtgcacttctttcttttctttctttccattaatttctgaaccttcccttcttaaactttacccagagttttctcatcatatacgcatttcattttcattgtacttttctgcatctgactatttcattttccagttgttctggtatgtttttctaagtattgtccaatcctttccattaagttacaagctccttgagggcaagcattgcacacctgttttgcacaacttctaaggccgttcagtccctcagcccactgtatagaaatatagtatatatatagacaatacacacacacatgcacacacataccttgccacttaatgatgtaaagtgacaaaaacttttatattggtaaaaattatgagaataagaataatcatatcctgattcttcaaattcaaatatttgtctaacattttttgatgaagtcatagcacttatgtgtcattgaattgttgtgggcatgctaacaggaaagatggaccaagtggttgaccctgtccttctgtgaatagaacctcagagtacacttttctgtaaacatttaaaagacaaggaattggaacttaaaatggagcaaccaggggggcagggaaacagaataaacttttaaaattgacctaatagtaatcataggaaacaaaaagaatcattccagtctccatttttttttttctggatgcattttgtagctccctaagttattgggtttttaagaaacataaaatattcctagatcgttagagatgtgatttgatttcaatcccacatggtctgtagcatcactaagctactgggaacttccctatgcaaaggtttgagtttctttccaatgctgtttaatgtctgcacttctagtgtccacataaatgagatttaacaggctttacttcatactttcttgttacaacatttttactttttttccaattgcaaaattatttcttttaagctctctgaataagtttgttgaagctctattcatcacacataaaaatcttacattaaaaggcaataaaggaaatcacgaaaagctagatgtattccaccctcttatagttgaatacataaaattgtatatatcacaaatagtaattgaaactactcttatgaaaactatctgtccttctggaggggcattagtttaaatgcaaagagaaaacatatcatttgtgagtctaaatagtgttgttagttctttgaaagggccctaattaataaggttgtagaacacaactgcaacctgtaaagcgttccatgtgtagtattttgaaaccttttgtttgtttgggttctaactagagacagagggagaaaaagtcaatttcattctcatgggatttgtcttatgtggttcatcagattgagtttagtaagcagggaagtatttctccttgtgtagctagtgcttgtttattcttcccttattaaaaaaaaaagagagaaaaaaacaaaggattggcatttttcttttatgaacgtggactgtagggagataaatagccctgcgggagaggaaggtcaagttcaaagtttttctttcctttggattcaggaataagcaaatggaaagactagccaaacaacccagcagcaggcatctgatggttaagccctccccccaggactttttatgtacataagcagcagaagtcactcgcgcagctgcggcgcattagttccaatagtttaacaggctgctttgtagcacggacaaagccgtgcgagcgcggtgctttccctccttgttcatttgctatgcgagcttgtcagtgatctttggcaggggcttgggagaggaggggtgacgtttaatacgcttccgcggaggagtgcgctcgcctcctctgcacccagccccaggctctacagagagactgaggcaggcgactgaatgcactaacagcagcaggctcagacctgcttccctggacatttccgggaccgtgagcgagggaaccacgttgccctggattcttgccagctgtacaaagttgaccaggaaaatggctcagcagacaagcccggacactttaacagtacctgaagtggataatccgcattgtccaaacccgtggctgaacgaagaccttgtgaaatccttgcgagaaaacctgttgcagcatgagaagtccaagacagcgaggaaatcggtttctcccaagctctctccagtgatctctccgagaaattcccccaggcttctgcgcagaatgcttctcagcagcaacatccccaaacagcggcgtttcacggtggcacatacatggtaaggtttgcgcagacctcgcagaaatggtggccgtttcccttcagggagtcctgctctcgcgcctttaattttgggggtagggagggaggaccatcatcattcctcaccggggatttatggccaagtgatctcccttaaccataaatcccacaaatgtccaagtcagggcaagaatcctggagactggtactaggagtggttgaggtgggtggttctcaaagttcaattcctattgcaagttcctacaagaaaattggatgccagatgtcaaataagaatgcagttttattcccatacgtacgtagtggcgtttctttgattccttaaaccaatttccctgccagcttccccaacagctgaggaaagaaaggaccagaaatgaggggaggaaaatcatagtttgctctgttttctgcatgatccccacttggacagagacacatacagtgtgtgtgtaatggtggtgtgtcttcataaagcccttcctcactcctgactttgatatacagtattcataatcttaaacatgcctttccaaaggaaagaagaaagggattaggaattctacgcagaaagttgcaggctggtacttggtagtattgttgtgttctttgaatttggattgttagaacattttgccaatctttttattttctttgtgaatatttttatcttctttataatgggtgaatttgtttcatgcatatgcttccatgtatttttctggaggattcctcatcttttcctgctcttggaaaaaaaaaaaagaagaaaaacccaaatattaaaacagaccatcatgtgagcttatttggagtatttggagtttctgcctgagtagaggccattccaaactctgatcagtgagtccaagtactagggtctatgttacacacttagataatttcaggtagtagtaggttctatacattacatctacattttgataagatgagtataaattatgataaagaaaacataacaaaaaagaatgagtgtgttagttgagaaactgtatgactaaataattttttacagttttgccataactaactaaacagtatgtacgttagcaatgggagggaaaaaaaaagcagaaacaaggcttttaggaggaaagcagcaaaaagtaaaaggaattaaaacctaaaccagtgacaagaccgtgctcaggaatgcattgatgttatagatgaaagtcaatgacaaaggaaataaaagccatgtcacacccaaagacatgaccaacctcaaaaatttggttttaagtagctagatctctgactgggaaagtgttattgtccccaggattttaacacctagatggcatttctgagtttggtagatgtaatggccataagaggagtgagacaaacattgactttttctgtcttaaagcagttattgggaaatgatggcttctctttgaggaagattttctttttggaaaaaattgtgagcaacaaacagtgaataaaagaaaggcatgaataaacactgggagatgcactgaaggagaaggttggctcaaggccaggcatcgggtgccagagcaggagagctggcatgagttcctacggagccaggaccagaatttccgtgtccagtgtcccttttggttgcgctgctttatcactgcagttcctaaattgcacccattgctgaatgagtggccctcaactcagctgtttgatttcagtctgagtggagcaacctagagttcagctggaggttatctgaactatttagacatgtcgggatgtaaggaaggcaggaaatcccatgaaaataggctttcttctgacatttctggcacttccttttctggtgctgtttggaaaaacttcatgagcacaatttctatcaatatttcattttagtgtatcaggtcacagcccagtaagaaaagcataaagagagcaatggaaaccagaaataaaaatcatggtatcgattttcagtaactcagaaggaagcagtttcccctatggactaaaactatcaggcaagggagttggaaagagtatctcaagttttccatattggttgaatgagccccaagacgttcataatatccacaggcatcttttgacaaaaatctcatttgtgctttcacagtttgtgctaagcactatggagaattttgaaaatatgtttcaaattgttctgacataaatataaatatatttgtatctaatttgttgctagtacagtgttctgcctcacagtttcctgctcctggtattcccctccattcgctatgcatacacttaatacctactgagtctaacatgtttattctgtacctaattattacaaagttgagcaagaaccatttgttggtttccaataatttataccatggtagaataaatcaataatattggaagacatctgttttagctaagataatcttgctgttctacaaaatagtctccaaatctcattggattgacacagtgaatttttatttcttgcttctgctttttgtggggaggcagcctgccctagccactgggtgcctcagggacctggaattctaccatcctgtggttccattatttgcaacatgtgattcccaaggttgccaggctcagatgaatcaggagaaagaccatgaaagaggatggtatgtgtgaacttttatgagacaggccgggaagtgcacatgtcacttatactcgttttcttctggctggaactcagttctatggccacatctaactgcaaaggaggctgggaaacatagctctgttccaaggcataaagtaaagtgctggtggctaatctatcttggttatatagtatgttaagggctatctgatttaccctctatgccatggttgaattcttagaataacatctgtaataacatatgccattgttgaattcttagaataacatctgtaataacaagtccttgaacctctcgtcaaacctccttgatgaagattatacagaagcacttctgttgtttgatagggctgttgattggaaagaccttgcttctaaacagtagaagtctccttccctgcaactatcatccatggatccaagatctgctttgggaatcctacaacttgaatttttgctcccttccattatgaagccctaaggcaagtggcttggagtaacccaccagagaaccagggccctattcattcattttggtatacccatgcttggcatgatggctggtcaatggtggaagcttaataaatgtctgctaaacaaattcattaatcaatattttagtgttctcatgctcttaaaaaagacttctcttgggctaagcatggtggctcatgcctataatcctagcactttgggaggctgaggagggcggagtccctgagctcaggagtttgagaccagcctgggcaacatggcgaaacaccgtctctactaaaaatacaaaaaattagccaggcatggtgatgtgtgcctgtaatcccagctccacaggaggctgaggcacgagaatcacttgaactcaggaggcggaggttgcagtgagccatgattgtgccactgcactccagcctgggtgacagagcaagactctgtcaccaaaaaaaaaaaaaaaaaaaaagggacttctcttttcttaagtaaacatcctgttatttcatttctatatgctatatttaccaggtagtttttatctagacttctcttgggttttcatgatccatttaaagaatagctactgaattgacagcatactctaggtgctatgtcactcagcaccaaagcagttagaaaagagactaaacttaaattcttactttgcatttagtaattgtgtgactttggtcaagttacttaacgtgtgcttcagtttccccgttagtcagttttctgggaatagtatctattgggggttgtggtttaattaagtacaattatgtataaattaagtggtttcacagggctggacccttagtgggtgtcattataagctagtattttttttattatgtactctgtgcccattattccagccttggtctgcatgaacctttaggatcatgtttaaatttctagatgattactctgtcagtcatttgtggatgaattagagtgaagagacaagagttgaaagaaacgagtgtatgtcagttttattactgtaggaaaggagaaggcagaaatgagagatactactgaggcagaactgtggggtttggtgtctcttctctgcccactgcaaaaatacatctttcaaattcctggttttcctaaaaggttcctccagttctcccaactggaagtaatccgttccttccttcaaggaacagatttctattgcgcctcttgtctctgatactctcaatgcttattagtaatagttttatcactagctagtatgtgttgagcactggttttggtctggcaccatctgttaggattagaattctcttgtgtctctgcttttcactaatctgtttgactgcttttactaaacatgcaatgccttgtagttctagtgattatagacatgattcagatttcatctggtaggggattccctctatcatcagcaggaactacaaagtcaatggaatctctggtgaagaaaacttaacttccagtactagtttatttcaggaaaattgaaatcaggaagttcttcacattcttcaggcttttctcgtcattgaattttaagcacagttttggggtgtaaggcctaaataagttttagaagaacaaggtagaaatgctggttttcagtctttgggaacttaaaagttgctgtttagtcatatttaagtcataaaacctgttatcttcacatattcttttaaaaagtaatttagcattataatcacttaagttataattttttcatatttttataatacacatctatatatccacgactcagatttttttttattttttattttattattattatactttaagttttagggtacatgtgcacaatgtgcaggttagttacatatgtatacatgtgccatgctggtgtgctgcacccattaactcgtcatttagcattaggtatatctcctaaagctatccctacccgctcccctgaccccagactcagatttttaaaatgccaaaattttgtcattgtttgcatcagttcttttatttttttaagaataaaatgttacagataatgtctaaagctgtcacccatcctattcttcttccttcgcagaggatcctgaaatcagtgtgttcttccttgaatgtcattgtcttttaacttcatatgtatgtgtcctgtttgtgtgtttaccattttatatatagagatggtacatgtatatatatctccataatatgccatactataaaatgagaaagagcaagctatatatatatatatatatatatatatatatatatatatccttaagcagtttgctcttttttagtacatagtataggaatagagttgtgaatatatatataaaatatgtgtgtgtatatatacatatatatgcatatatgtacctatatacatatattatatatacctatatgaacctatatacatatatacacatatatgaacctatatacacatatacacataygtacctatatacacatatacacatatgtgtacccatatacacatatacacatatgtacctatatacacatatacacatatgtgtacccatatacacatatacacatatgtgtacccatatacacatatacacatatgtgtacccatatacacatatacacatatgtgtacccatatacacatatacacatatgtgtacccatatacacatatacacatatgtgtacccatatacacatatacacatatgtgtacccatatacacatatacacatgtgtacccatatacacatatacacatgtgtacccatatacacatatacacatgtgtacccatatacacatatatgcatatgtgtacccatatacgcatatgtgtacccatatacgcatatgtgtacccatatacgcatatgtgtacccatatacacatatacgcatatgtgtacccatatacacatatacgcatatgtgtacccatatacacatatacgcatatgtgtacccatatacatatatatacctgtgtacctatatatacacacacacacatatatatatctatatacctacatatatatacacacatatatatatacctggatcattttttaaaatgctcaacagtacacacatgtaacagcatttcagtcaatggtggactgcatatttgatggtggtcccataatattataacggaccagaaaaattccaatcacctagtgaagtcatagcacaatgcattaattactcttgtgtttgtgggcatgctggtgtaaacaaacctaccatgctgtcagtcccataaacatatagcatatatagttatatattatacttaataataactatgttgctggtttatgtatttatgtattttaccattgttttaaagagtactcctcctacttatatacaaaagttaactataaaacagcctcaggtaggtccctcaggaggtatctagaagagggcattgttctcataggagatgacagctccatgcatgttattgccccagaagagcttccagtgggacaagatatggaggaggaagataatgatactgatgatcctgtccttgtgtaagcctaggctaatgtgtgtttgtgtcttagtttctaacaaaaatatttagaaagtaaaaacaaattaaaaataaaagcttatagaataaagatatagagaaaatatttttgtgcagctgtataatgttagtgtttcaagttaagtgttattacaaaagagccaaaaaattaaaagaaaattaagagttgtataaagtaaaaagttacagtaaccaaaattaacttatatcaaagaaataaaaatatttataaattaagtgtagcctaagtgtacagtgtttataaagtctatagtagtgtgtggaaatgtcccaggccttcacattgactcaccactcactcactgagtcacccagagcaactttcagtcctgtaagctgcattcgtggtcagtgccccatacaggtatatcattttttatcttttatactgtatttttaactgtaccttttctatgtttagatatacaaatacttaaccattgtgttatgattgcccacaatagtcagtagaataacatgctgtacaggtttgtaggctaggagcaataggctataccatctaggtttgtgtaagtacactctaacatgtctgcacaatgatgaaattgcctaatgacacatttctcagaacttagaataagcaatgcacaactctgtgtcaatttgcctctaaaaacccagctgtttatactcttaaaatattgttactatagctgtcagtatcacactccaatctaagtgaatgtcacaatgaaaaacattgagtcattttactataacggaaatgaagatgtaatttcctgaatttaacagtcaatttaggctacatagtgaaatattttcaagctactttgaaaacattaaccattaaaaactaatattcatgggtagcattcactaagatgcatcaggtttgttatttatgatatatctctcaaaaacatttttaattccaaatataattaaaaccaaatacagttttctaatataagtaatttcatggggattatattcctgattaaggactagatgaaaacattgtcaatttatactgtgctcgatgcactgaatggaggaaaatgttccagcgtgtatataagcgaaattaggtagtaggatatctttaggaatcatggtgactaggtaatactcaactgtataatttttataattcttgtatacacatatgtatttttaattaaaacatatccaacagtagaagaagtacttagtaacaatcttaacaacaaaataatttctttaggtggactttcaaaaggccttttaggagacttttaataaatcttaaatgtgtttaggaagctaaataagtgattttggccatattttttgtttactataaatttctctttatcaggcattggcattagatgtaaagttgctcatatttaaaagtaaacatttgctttctgagtcattatttcttcagcaactgtagttgtttttatggttgttaagagaaatataaatttgcaagtcatagaaggggaaagaaaccatttgtcacctataaaagagaaatacagccacttagagtttgtagagtaaaaatacacatatacacacacaaacaactgagtagattttcaaagccattatttagtgatttctctttgaggtctctttctccctcgttccatctctcttacttctgccctgcttagctttaaggttatcttttctctgtctcttatggtaataatacccggagaagagcattgctgccagtctcctgggaactaggaacccagaggagggctgtaggcaaagtgtaataccagaaggtggggagcaagtttctgggggaaatcatctgagaagcacaccaggaagtgctgctggaatgtttggggaagaccagtcagccctaaccttcagccatgtctgtggcataactggctgttgccctctgtggaaatcatgggaggtggaggcgctgcaagttgagggtgtctgtaccatttgaaaggcatagttggctttccacgaaatcaaaagacctgaggaagattttccttttaaagaacatgccgattggcttgtcatgtttaaggaattacagggattacattatgacaattggcattgagaaaaaagtgaagaaaaccttggataaccttgcagcttattattcacgtgtgcttcccatgaccattgacatttatcttaaagagaaaagatgtgaagcctgttcgtacgagctgaagccgttgctactgatggtaaaatctcttcttaagaagacatggtctttcttgcaaacttggcagaaatgttgataagaagaaaataaaaacttgaatcttaaagttcattaaaataatgaaaatcatggctttgattttttaaaaaatattctttgtgtaaatttctttataattgaaaagctcctatgtattcagataactaaaggagtttcagcactttttttttcttagatagaaagctaccaaatttgttcttcaagtagcactttcaggaagaagctttactatctctaatgtagcaaaataatgtcttttttttaatggttttgctttttaaaaaatcatgtttttaaagctgcgattcattcagtatattgaaatcacatatttccaggtcttctggtcatttgatacttgaccttagttattcaacctttttgacttggagactctattaataagtcatatggttataaaggcatttggcatttacaagtaaaaagtaatgactaattaaatttacaaagtgataacaaactacagtctatttaagattagcaattagaaacaagttccaacttgctgctgtaagaaagtaaggtagatgctacatgggtaaaaacaggaaacagaattatttaataattctgtgactcataaataggattcagggccttcagaatgaaggtattggtggtattcacgttaggccaccatctgaaaggcataattttaggtaacagatagggaaatgtatagatcactgtaaagattctaatttaaaattctcttttactagacttcaattttataccatcttaacacatcagtctcttctactgtaaataagcaaaacagaaaaatcattttatgtgcagttttaaggacataaatactctccaagtatttcagatgaggcacttattctcaaaaggagatcttgaaaagttgatctgagaagaaattacatgatttcattttggaataaaaacacttaggttcataataatatagctttataaccttagattaattataacatagacgtcaatgatttagctcctgccatgtgtcaggtactttgtgtacattaaccccttaaaacaaccaaggttggatgtaagtattgttaaccgtactttacatatgcagctgctgaggcccagaaaaagttcttacataaccaagatctttcagctaaacagctatgaaaccaatagcattaaaacttgaacccaagtcttcctaactctccatcgtgtgttctttctttcagcattaccttcctttgggctaagaatcacattcacatttgttaccctaccctgcatgtgtattgaagttataacaatgaatattcaaagattttacaaaatagtagttaacagaaaggtagagacagagcccttttttggtgtggaatctcagtttattagtttacacatgtggcttgtatagaagttgacatccttataaaatattcttataaaaatatgtgtgtgtaggagaaatatatgtccttggtgaaaaggggtcaatggagaacatttgattcagggttgtttttacataagaggtgtaaaaacaaagccagccagagaataattttatagtcaatcattcagggaaagaaaaaagtcttgagctctaaggagaaagatcaagtcagaaatctgttaaggtttgactctggaagagccagctgggaatgatggccggctagttcaagtcactaagcaacagaacagcaaactgcttggtaacaagatctggcctgactcacaggctctctttgagtgacctaggtggccagatagaggaggaccaagacccatcttacctcaaaacaatatccttccatttccactttgccagccttcatgccaaattccacattatagaatagtctctttgacttgagatatttccttttagaatggaaatatctctgggactagaagctaatattgttgtctttcttctcagaaatagtgtttcagagattgttttctgtgattcaatatattatttaaaaagtgtaagctttaataagagcaaacaaagtggaaacatttgagttggtggtctgacttttggttttcgtaagcaaatgtatacagggccaaaactacctaccttcattgggtgcaatctttctttccttgggctctcagactgaatgtgttgacatttatttgtcattttctatgttatgctgtcttctagttcatgtttgtatttcaagtatgtagctggactgtaagttcctaaaaagtaagaaccggccgggtgcggtagttcatgcctgtaatcccagcactttgggaggctgaggcacgtggatcacttgaggtcaggagttttagaccagcctgttcaacatggtgaaacctcgtctctactaaaaatataaaaattagctgggcatggtggtgcatgcctgtaatccgagctactcgggaggctgaggcaggagaatcgctggaacctaggaggcggaggttgctttgagccgagattgcaccattgcacaacagaggagataccatttcaaaaaaaaaaaaaaaaaagtaagaacctccacattcatcaatcattgtatccactgtgaaggtacaagtgccacctgtataatatacattcaataaatagttgttttttgatcgattgagaaacataccttctgttgctgtgtcttttatgctgaacacccagggggatccatacccttccagactagaagtcctggtgatgttggttttgattgccatagtggaaaaaaactttgaactcaatgattaaccatttgtgtggactttgtcaccatgactcagtgtgtgtctctgtgtgtgtgtgtgtgtgtgtgtgtgtatgttttgggtttacatgcacatagattggtatagttggctttggtgtatatgaatgattctgtatcttattattctgtcacaataatttgtcaaatacatgcattttaatatttagcttatactttgaaaattatttatgcctgttatatttctgaaaaaaatctgtgtaaatgtatctatgattcttgggaaattactgaataactagcttgttaaattctgatgactaatccttatcttttagaattcataacagttaaattatatatcaagacctaagcttacaaaagaaatgtcaagattttgagaaatttgcaaaaaaaaacccttcatagtttcattttcagtgttttaatttggagaaattttaactggcagaaattaagtaccatttttccaaagtagatcttcagaagaactaaaataatagaaaacctttttgaaggggtttagcatagaaatattattttaatataaatatttttatacagttaaatattatatatatcatttttaaattgcagtaatttgagaccaatttttccccattacccttttgagataaccctctgattaaattagctattattaaaataaagtggcttcctcttcatgttattagtagggtaccagttttttggtttttttttttcatacatggctaatttcacatttataaatggtgaagtgtgtattgttgaccttttgaagcaagcaactttctgacttaagattacttggattatcattcctgcttgtttgccttctttaggttaatagtatttgttttactttgctttattttgtgcagtgtgattttttttatgaccttctattgagtgattgccaaatagaacagcgtatgatttatggatactaataactaaaatatatatgaattgcaggctgataatgcacaaggctgatttctacagttctcctctgaatagaaccaggcttcctttaataaagccttcttactaataagaatagcagtttcactaacacattgatcattcttgaatcaccttcacaattttaggtgcaactgtgggccatttatactgtttacatttaatatttctagtagacttacatttttatttaaaaggccatatgtttaaaaataaagctttgtatattactgtaatttggaactagcgtcatttattatgcatagaagataattgaaaaaatatacaataaacaaggcaaaatagattcaagtttagctagataaccatgaccttccaaagactctgagcctgaggtctgttctctgtttaaaatggcatttagcaaataatatagacatatgaaagaccacaattaagtctttcttcttaaggtaataagaattactgaaagggatttggaaaggaaataagcttctccttatttaattcaacattttaaaattcaataagccacatcagctatgccaaacaccatctttgtacaacctcaaaccatctaatataccaacctgaaccactgatacttccaccataggaagagggacatttgttcttgcagaagttcttctgttctcaatcccttagttgcaggtaaacacactgaacttggattgggtgatgctaatccctaagcagaaagtatgttggtactctgttttcccacactgtaattattaagttcttacctggtagctgcacagatgcaaaaaaaaaaaaaaaaaaaaaaaaaaaaatgttctgtggaaaattctgtacctgccaatggtagattccaagttttacttccaaagagtgtaaacatgggtgttttaaaaagtatgtctcaatgcaaataaatgagagctaagtaaggaaccacatttttctaccctgtaatcttttttactctgtaaactaattactttccatgctagaatgctcacacagcactggctacgtaatttgtagggcccaggtaaagtgaaaatacagggcccgttacgcaaataaatattacaaatttcatgatggcaacagcactgcattcaatccagcacaaggcccttctgagagtaggatcctgtataacttcataggtcacacctgtgaagccagccctgcacccacaataggtctgatgtgatgcccagaaagtcgactttgtaagccctacaggtgatgtggaagccatacgttgagaaactgtcttaaagggacatctttttagacagtctcactctgttgcccaggctggagtgcagtggcacgatctcagctcactgcaacctctgcctcctgggttcaagcaattctcctgcctcagcctcctgagtagctaggattacaggcatgcaacaccatacccgcctaatttttatatttttggtagagagggggtttcaccatgtttgccaggctggtctcgaactcctgacctcaagagatctgcctgtctcagcctcccaaagtactgggattacaggcatgagccactgtacctggccttaaaagaacatctttattcataagctcctcattttacactgttgatagaaacttcagaagacaatgatatgcgttgaagtaaaaaaacagaagttccaagaaaagtcagagttggaccagctataaattaaagagaaacattatcttacattcatcttgagagttttctttgcaaatgaacacgtacatacacaaacaaacttaaagcagcattgcctttgcatttaaagtcacttactgatatgcacagtattagtcatggcaaaatattattagcatttgaaattgatgctcatccctctttgttgatactgtctcatttactggattaactttattcatatgagatctcccttttcttttcattgtctctgtttccagcaccttaattgaaagtacccccggttacataattattcctttgaccttattcagtatgttccctgcaccacaagtgtctctcctctgttcaattccaactgtcagctcttttaataaaccctactcttaaacctcatttcccaggctcaagttccatatgcctcctctggacatttccacgtggaagatccactcttaatttatatttaacacgcacaaaaccaagcttactgtgcccccctttttgatttttctacttctgtttatctggccattatcttcccaaaaaaccagaaaaaatcatatttgacttctgccttgccctccttctgcctaggcctatggattatttcacctattatctcttgctgttctgttccctcccaataccaccaggtattttaatacttagatttgtgtttgatctatttcaataacattctaacttgtctttgtgccactagctccttcccactaaggatgtcctacttatactgtctcattaattaccctacagttctgctttgattgtccactatctatagcagaggtgaacaaaaggaccagaaaataaatattttaggctttgcggaccctatggtctctggggcaactattcaaccctaccacggtagtgcaaaagaagcccagatatacaaatggacattagcatgttccaataaaactgtatttgcaaaaacaaataggctgaatttcgcccactggccgtaatttgccgatccctgccctgtaggataaagttcacacctttaacatggcatctaagcatctgtcatcagttctgcacctatctctgcaaccctatgtgttattgtgtcctatggatacttcacatccttcgttttgaagccgaatctagagcagggttgctcaacctcagcagaactgatgactgggccagaatgatgctttgtggtgggggctctcctgtgcattgtaggaggttaagaacatccctggccactgcccactagatgacattaatttccaccatgaggtgaaaattcaaaatgtctccaagcactgccagttttcccttgtaggggacgagggattgttttcagttaagaactactgccctagggagtaaattttgtgaaggggagaaccagttctacctcattcacaggtgtatccctagcacctagcacagtcttgtgatatacaaagaggttcaggaatctattgcatagtccaactctgctactcactgtgggatcctagggttatttaaattccacaaatcacaattaagttcatctgtaagtggaactattactaattcatacatgtttcataaaattatttagaagttcaaatgatatatttaacaaaaagacctcttgaaagacagtagtactttcaaataaaaggtaaacatacaattgatagaacactgaaggtgatctgagcctattgaaatctagaagcttaatttgactcacatactctgtctacactgtacaaattactatatgggatgttattggggcattgtctttgttctcaaggattatgacctaacaggtgttagaatatgattactcaaccataaaacaatagttgccataactaagcataaagagtggttggaatttatgggagggagacattgtatctggtactaggaatcacttaagacctcatgagtgagatgaaatagtcacagagaagtcccaggcaccctactgagcattgtcttagatgatctcattgaatattcactgcaacttgattaggtttaggttttattatcacatttcacaaagagagaggggcctaggaaggaatttgatatgaatgtgaagcatgggagatttcagcagggagagaactgcagtgaagtgtggaaggaggggaagtgacaggaggtgttttctcaccaagggaatagtgtgaacaaatatggggattacatggggtttaggtgagtttgagtgcctctagggaaggtaggttggaatcagattttgaaggattgctaacatctctctctctcttgctctcgcttgctcgctcgctcgctctcacatcacacacacacacacacacacacacacacacacacacacaccagggatttatatgtataaaagaaacatgatgatgttatctttcctaacagcttcactccacataacaggaagtgacattttgagttcttaccccatgctaagcttgctaagccacaagtatgtgcactgaacactttcaatagttggactttgagactcagttcaattagaccaatctataccatctttcagctagctactgctcttctacttttcccaagataatccttctgaaatagatacacaatgctgttttcattcaaatcagatgtgttaattctactagtggcacttgtgttctgatgcatagaacagaggcattatttacgtgaggactgtgccttccttcttactgaattgcaaaagtatacaattcttagaacacatctagcagttctgaggggctggacacagaaaaccatcttactctgaaggtaattttctctattttatcactagctcaccaaggtgagagtcaggagtgaaatatcctattttcttttcatccattcaaaaaatagtttgagtgtttcctgtgtacctattgttcttctggagatagagaactgaatgaaatagacagtcttccatacattggggcatactttttttttttttttttttttttgagacagggtcttactcttttgtccaggccgcctagagtaaagtggcatgatcactgctcacctaagccttgacctcttgggctctgggttcaagaggcctcccacctcaacctctcaggtagctgggactacaggcacatgctaccaggcctagataactttttattttttgtagggatgggggtctcactatgttgcccaggctggtctcaaacttctgggctcaagccattctccagcctcggccttccaaagtgctgggattataggcatgagccactgcatcaggctaaagagcacatattctaataaaggagaagacaacacacaaataaatattccagtgggtcagagaaagacaagtacagtatagaagaataagtcagggtaaggagttacagagttgtatgtaagacatttcagcagagatctgaaagagatgactgaacgagctatatgattatccagcagaagtacatttcattgtgatttcaagtacgccaaatgtggttggcgtatttgagggaggggggaagttatagaaaatgaggtaggagccacagaaaggcatcagatcacatagtgctttgagcctgtagtaaagacttgggtcattccttggtgatgactgtgatgtattgaagcaaaaagtgttagtagtaggaatgtctgtgttaggaagggacacagtctatcataagttttggaagaatcatcccggctcctgtgtagaaagtaaagatgtggggaaaatggaagcagagaccagttaaactattgaagtaacccaggtaacatgtattggcagtgtggactagagaaatagaggtaaaagtagttaaaaaaaaaaaaaaaaaaaaggtcataattctgtctaccatttgaagacacagccaacagaatttgtggatgcattggatgtgaagagtgagaaagaagaatcaagaataactcttaagtttgtggacttagcaacaggtagaatgtagttgtcatttgtcaagctgaggaagattgtggaaggagcatttttaggggaggtggatcaggagtttagttttaaaaaatttattttggggatgcctcttagatttctgcatggaggtttcacttagataactgaatgtatgagtctgaagtttggagcacagattagcacttgagatgaacacttgagagttattaaaatgtaggtggtattaaaagtgataagtctgaatgaatcacccagggagcaagtatatatagagaaaagacctgagacagttggggcactttaaaatctagaaatcaggaaaatgaggaaaactcagcagagaggccagtgaggttgaagaaaaattgagagtgatatctggaggccaaatgaacaaactgtttcaggagaaataagtggctgggcatggtggctcacggctgtaatcccagcactttgggcggatcccctgaggtcaggagtttgagaccagcctggccaacatggcaaaacctcatctcaaataaaattacaaaaatcagccaggcgtggtggcaggcacctgtgatcccagctactggggagtctgaggcaggagaatcatcacttgaacccaggaggcagaggttgcaatgaactgagatcatgccactgcactccagcctgggtgacagagcaagactctgtctcaaaaacaaagaaacaacaacaacagaaaagtgataaactgtggcagatgctgctcataggtcaactaaaataagaactgagaattgatcattgcattggcaacatgcagccaattggtggcatacaacacaagtcgatcagtagagtagtgatgatacaggactgactagagtggaatataacaaatttccccaatgcttaaaccaacaagcatttattattgcatacagtttctgagaaatcagggagcagcttagctggctggttctgactaaagttcctagaagaaattgcactcaagttgtcagtgaaggctatagtcatctgaagctgtatctgggactggaagatcagttttctaagatggtgctgtccgcaggcagccttgctttacactggctgttggcagaagacttcagttcctcactgtttgtgcttctccaaagggctgggtgttcttttttttgttgttgttttaatactttaagttctagggaacatgtgcacagcgtgcaggtttgttacatatgtatacatgtgccatgttggtgtgctgcacccattattaactcgtcatttacattaggtatatctcctaatgctatccctctcccctccccccaccccacaataggccccggtgtgtgatgtcccccttcctgtgtccaagtgttctcattgttcaattcccacctacaagtgagaacatgtgatatttggttttttgtccttgcgatagtttgctgagaatgatggtttccagcttcatccatgtccctacaaagcacgtgaactcatccttttttatggctgcatagtatttcatggtgtatatgtgccacattttcttaatccagtctatcattgttggacatttgggttggttccaagtctttgctattgtgaatagtgctgcaataaacatacatgtgcatgtgtctttatagcagcatgatttataatcctttgggtatgtacccagtaatgggatggctgggtgttcctacctcaggcacaggagtcagtgattcaagagagtgcaaagtagaagccacaacgacttttatgacccagacttggcagcaacacactattactctgccatattcttctgctcacatgtgccaaccctggtacagtgtgagagaggactactcaaagttgtgagtatctggaggtgaaggcctccttataaaaggactaagtcaagtggattcaagagatgatgggaaaagaagtggtggcaattgttaactcttggagttttgttgtaaagtcagttggaggggataggaagaaaaatgagatatgggcaaagggtgtgttgtcaattgtattatgtttgtgtggttttgagaaagaagcagcagaaaggggacatttgatcatgagaaactggggacaattgcaggagcaatattcttgaggaggctttgggggaataggggtaaggagaagttcagatagtgcacaagccaaggagttgcccttaatgggagtgctgattgttcagtcctcacaataaatgagaaagaagagtaggacagtctgagagtataggaggtcagtatcttgatagatctggtttcagagtgtatgaaaagtgtctcttaattccttctattttgtgataaaataataagctcatcaatgtaaagacagagaacagatgttggaggtttgaggagagagaaggtgagaaatgatccatcatctctgggaggagagagtgctttgtctagagaaatgtgaaattcccagacggcactaaggagccacctcaggccagtagttacaaattcaaagtcatcatggttgtgtttttcctcaactatcattgactgcttaggccacaacaagcacggtttgaaaaaggttggtttaacagagatgagatatttcagtgaagtctgagttttaaaaggatatgcaaagaagtgattatgctgccatatttactctaagctcactaaggaaaaggggacataagtttggtgagggtcagaacaacttctaaggtcaatgcactggaggactcattgggtttggaagatttttggagtcagaatactggaggggatgagctagaaagagagaaggtagggagagacgcttaacagtggttatggggcaccgttatctgtcatggcaaggccttgcttatggtaaggaaaggaggtttcaggtaagattatctgaagggagatccagaaactgggagaccgtgggaggaaaagataattatgagttatgtaagagtttgcgctggagagagacagggctaaaatgtttaaagactgagaggagagacctttaggtcagtagaaaactggattaggaggggagcagattaatgatgtgagttacaaagacattttagggcaaggaagagatcatggtctggaagcagcagagaagaatgagaaagactcctacttcactaggggcagaggtacaaacatgtggaaggaaaaatagccactgcatcagagggctgaagtaaatccgtattctcggtgggcagccagtagtgtcagagcaagatggtgcaggaaagtcagagaacatgctgaagatacaggagcataaggagattttgctgatgacagactgaacgctaggagtcacgctggcgagtttgcaggaattggggaaggctggggatttcaaagtaggggatttacagagccatctggtgatgagcaatgacctggcagtcttggactttgtgtggtgacggttgtgtattcaagacaaggaccttggttttaagaccatgtagtcagacaagcacaaactcctctgctgggatggccggtttctttggtctatttaattagttccagaaacagtaattcatcctcactgcatttatagaaattgaggggagaggtggtgggtaccagactggccaggtctgcccagtcatcttcacttcaacattcctgtctggtaaagtcatattattctcacatcttggccgtgtgtgtatgctccaagaatgagacagatgacagaagatacagaaaaacaattgggaaattgctagtttgcagatgtatagccctggcacagattttctaatatgaaattgccattttttccatgatttggacacaaaatcctgttcttgaatatgatgttcagcctagatattgaagaactgaaaaatatttttgaaaaaatatatatattgcatttgtcacaacagtttatacacataattatcacaatgatattgcttttcttaaataaataggttttatgtgttggcatgaaatacttttacaagatgatgccaggttttaacatttatacaggaatattttcattatcataattgttaataaaacaaatatgaaatgtatagctttctctttggagtttgaattgttggttcttactgcctgcttgcatatttatattagttgtactggctggcagttattaggaaatacgatcttctgtgtcttaggagtgcgccctgcaagcaacatgtgcaaacatttttttctttctttctttttttttgccctaaggaaaagggtaagctctggcaccttttaacctgtaaggattatgtggctcttgctgtgattgattggttggcttctcctcaagaaatgctcctggtgcgtattttatgttctcacagagccagggctttgctgatcagcacgtcacccctgtcaagacgtgggcttgcttttgtgcatttgctcttgcagcctgggaagcatatttcaacacactgtccagaattggctagaacatgcctgtcactcccagctgactctgatgacgctcttgccaacgtagatttacatcaacacagttctttactggaaaaagctcattcagaatatacagggtggcccatttaaaagaggcatagcgtcaatttgaagagaaatatattttaaagggagaactctaagaaatacacagtcaattgaaggctccatggagcatagaattataactagcatcacccgagaatttttcccctggagattgtcctaagctctaacttctagagactggcttatcctgaaaagagaacctttctgttctagactttttctttcagcatgctagatatgtaggcatttttagcctcttctttccctaaccatataatctgaacaccatattcattgaagaaagcatgagatgtgaaagctgataagatgcaggattatgtgacaccattgctttttacctgtgcaaaattcagtttggtaatcaatggaaatacagattttacccttcacataaaattgtttggcatatgtccatcttgttttttgactcatccttgatatcacaatgaatgtttgggataggcatattactcagatgtgtgggtctatagacaggaaatcaggcattcagaaataaagcttgttaccatagctatccaggaaaaaaatacaacactgtctttgctgtacaaaagaaaaattcaatactactgtcacatgatatgtgattactattattatgacccaatgctactcacccttcattttcatcattctagtctatttcaggtcattacagtaatggatacaactgaatgggtttgtaattttaccccttctctcatgacaaccagcaggattctcaatgacacatgctttgatctgtctgcttttaaatctcttaagcagggtggctctagatagcttcctctcagaagattttatgattctaatagacctcatgatgagttctatatttgtgcttgtttagatacatcaaagtcaggctttatactagggccacctggaaagttaaggtcatcagctttttgttatagtcattggattactgtgatgctcagcaataacaaagtttgaccttgtaaagtgatcaaaagttgtgggttacaatataggaatattaaagtatattctgccatgatgtgtcttctgttgtagtttgtctagaattaatattacagtcacaattaactccaaagtgttctatactgcttgcatacagtacagtgggaaagaagagatgtcaaaatcagagaaataagattcctccattatgaattaacatacaaaatctacacttaatgcatcagaactaagatgcaatgttttaaagagattgagttgacaggtcaatcagatggtaggactggtaagaatttgagcaggcataaacaattggcagtatgtattcaaacactgtttatgagagtgaggaactattggttaacaagctgacattaagcatttagattatataaatcaccttattaactgcattctatctatggatctattatcgatctgtatctatctatcgatctgtctgtcatcttttgttttgtctggttccatgcttccaaagacattttctgatcttcattgttacatagtactctctactgagtcctaaagaacacagttctgtgtcaggctgattgaagtgtaatgatttgagtgatgattgtagtgctcaatgaaaggaaataaagaatatttggactctgttcagcagtcatatgggcttgtacaatatgagtctgcttttgagagaagaaacttgcacaaatgtctctttaagagcctgcttttaattcttttgggatatatatctaagtgtgtcttaagatagttctatttttaatatattttttcatactgttttccatagtggttgcaccattttacaatcctatcaacagtgcacgagggttcaatttctccatattcttgtcaacacttacgtgtgtgtgtgtgtttacagtagctatcctaatgggcatgaaattatatcttattgaggttttgatttgtatctctctattagtaatgttgagcagcttttcatgtacttgttggccatctgtatatcatctttgaagaaatgtctgttcaagttatgtactcattttttggtggagttatttaatcttttgtttctaaaatgttttgaatagatcaaggtttaacagtcattcctctgtgtgcttttatgtcatgtttagaaatgtgactccattttaagcttcttaaatctttttttactttaccattttttgggggctctctttttttatatttaacttttgtctatctgtaatgtgttttgattatgaagaataaggaaaaaatttagggtttgtttagcttcccaaaccccactttatagaataatcactgatcatgtactaacttataatacttgatcattttaagtaggctttgttattgagttccacatttggcacacctactggtgtaatgattgctctagtattagtgcaatagtatcgtgttagattttgtttgcagtgtgctaagtggtaaacctcagctattaatctaccttgactaaatatgtaattgttccctttattaagccctattttctttcaaaataaatattaactatgtttcccactcattcttttttgggggaagagtaaatataaagaaatgtttccagcaatgtgggaggccaatgtgaaagaatacttctatattatagaatgactatttttgcaaatgcaaaatgataacagaattcccagataaggaatagcaatgactgtttcagggcattacctaagtgtgtttcttgggctaaatttagaatgcctgattactgcacacctggtatgaaaatagaaaacccttgtgcctacatcacataatgcttaccacattgaggtacagataaaagaagttctagaattagggttgttcaaagcctggtttactatattttggatataaaatggagtaaatctcataatccttctgaacattggttttctcacttgctaaataggaataaataacatgcatgaatagtatagaatggttgtccatgtgtctaaacatgataatttgtggggtatgtactttataaatgattatatgcaaaaaggatggccagacgcagtggctcacgcctgtaatcccagcactttgggaggccaaggcaggtggatcacctgaggtcaggagtttgagaccagcctgaccaacatggtgaaaccccgtctctactaaaagtataaaaattcaccaaatatggtagtgcatgcctgtaatcccagctactcaggaggctgaggcaggaaaattgcttgaacctgggaggtggaggttgcagtgagccgagactgcgccattgcactccagcctgggcgacaagagcaaaactccatccacaccctaccctccccccaaaagaagatgatgatgatgatgatgatgataattgatatcagtaacaacaacagtaatactggtgatagaagatccttctggtgcaaaccattctcaacaatatgtttgctccagagaaggtagggccagactcctaatcccaatgttgtttaaaagcccattcagattatgaattcatttgaagcattttaggacccgagagactactagaagtttaccgttaaacttagatgacatacagttagaaaaattttccatagtcagctttttcttctcctgttatcttctgtattttactaagagaatgtttagttttaactactagaaaaacgtaatttcaggttgattaaaagagaagaacctagatatgtaaataaagatgaatcttttagacatgtagtcagtagctttcatgttactaatgaaaagttcttcatatcctatgatttgaaagaggaaaatcaagttttgtggaagaaaatacgtgaaattttaaataaatatacggcaactttatatagccagagttaattcttctttttcagtaaattgtattaccctgaaacaccaaaatgtcaatagtacaattatggtcatattgagagcacttgttattagacacaccctttagatttttttcttttgaatagaaactgcaagaatttttaaaaactgggcttattgactggacgaagggttttaaaaagaacagaaagacaaggcagggcaaatcctggtgtatttcacctgcgtagtgacatataggaagaagggacctttcagagatcatcttgagttttgactagatgataaaactgaggttcaggatggcacagaaaagtgtccaaggtcacacatttaggaaaatgtgggacatagacacaaattgtttgatgtagttcagtagtctttttagtctgacccagagcctttggggatggggacggaaggagattgggaagagcttgtcattgattcagtatctctgctcagtgccctcttgaggtttttgtttgtttgttttgtttttgtctttctggtatttttctgttgttttgatcctggatttggagtacaaagagactaaaccattttccatattgcatacctgactttgacttacactaggtgcattgaatgcaagaagcagttatgtagaaatgaattaatagataaatttactgtaaatctagacctttattgttgttcctcctatgctactagttagctgagtgatcacaggcaaattacttaaatcctcataggctcagtttcctctaatttaaaaggagagtgttgggtagttgatctctaaagtcctcttcagtgcaaagtgctgtgcttgcccctctttacctgaataattcctaagattgctgaagcatcattatctccttgttcttagctactgattgtatatttaattccacaattgggtttatctctattttcattcatgcatctttgtatcattaattccgaagtctcatataaaatctttaattcaaaaaattgagtgatggtacaagaaaagcaaactgcctatgaattccacgtgattgtgcccctatttacaaggtataaatgtgttaagaacttaaaagtttttgagtattgattattgttgccaagtcgtcaagacaatgcttataaagtaatccattatccttttccacactcttttcccttttagaacaaaaataccagcaagaaaaaaaaggatgactgttccaggtcatcaagaaagtagactacttggtcattatcaaaaatattttgaacatgtgggcactttataaaacaaagaataaacaatagaaaattatgtacttagaaagtccagactgttaataattttctgcacttaacacagtaagtgggcccacagacattaaggtactaaatgatttatagatgaatttattattcagtttcaggacaccagcagcaataaagtattttctacttttataaataactcatatggaacttttatctagtgatacactaactcttgtgttagaatgtgtaaagaaaatattttataatgcaattgtacagtgttggagtgattaggattcaaaccttcaacttccaatgagaattttaatacttagtctttaaaaatagtaaactgagatttatatttatgttatttcataccatcctatattccataatcttctataacatgattttatattcctaccttttattcaaccattctcttcatattggacattggctgtttttaattgttttaagataagcatacttgaaggtcaatcctggattggtgcattaagatgcattctcagaaatatgatgtatagagttaaagaacattttaaaggtgacatcgtgttctgcttttcagagactgttagcagtgtgcttgtagcgtattacactgctgtatcgctgtatcactgcaccatctcaaatattgagtttttttatagttaagtatttataaaattaatatgttggataaaatctaatttatctcaattgattaacattgaggctgcaaatatttttatagtgtaaaagaattttctattgtgaattgtacattagtgtcttattgagacattaacatttcctgtctttgttgttgttgctgttgttgttgttgttttgacacagagtctcattctgtcacccagggtgaagtgcagtggcacaatcttggctcattgcaacctctgccttttgggttcaagcgatcctctcatctcagcctcccgaatagctgggactacaggtgtgcaccaccacacccagctaatttttgtatttttagtaaaaatggggtttcaccatattgcgtaggtcagtctcgaactcctcacttcaagagatctacctgtcttggcctcccaaagtgctgggattacaggtgtgagccactgcacccagccctttctccctcacacttttggaaaaaatatttttctcagtttgttgcttgccatctaatttattacattgctttttaatatacaactatagacaaaagaatcacttttcttttggaaaatttgatctatgactttcattcatataaaagctttcctcaccctcaggtcaatgttcacctttatttttttctagttttttttaaactttgtttttaatcactgtgaaaataattgaaagatgatatttagataaaaatttgtgtaaagctctactattttgatacagattgaaaaggataaaaagaaatgagtaagaagtatgcgtagtgtttagaatgaacatgaatgataaactaataggtattattttacaaattatagaatattaaagataaatatactctagagtatagaaatatattttatattattatgttaaaatattaaatatttcaggcatgtaaaaatagatgatagtgtagccatttatgcatcaaagagttcaaaccatacaacactaaaggtaaaactggggcccctagtgtacccttccccaattctatcacctttccttcccacccagaggtaactactattatgtgtttacttttcttgagtatgttcttgaataggtgtgtattcaaaagagacagttcctttttgcactttggaaaacaaataattctgccttcccccccatgattgcattttatatgttttactaagatatttattataataaatattacaccacttttctctgtcctattcatggggaaaggaactctttttgttcaaaatttgtcattcttatattgtactgccccatattctgcaaatctgacaacagaatacattgtatgacaaatgtgatgtttggtacaaatatgtcagcttatgtatgctgttgcatgtgttgctcagcattgcgtgtattactgagcattgcatgtatcacttagcctgtctataaaaaattgagacatttatttaaataataattgtcccacaatctattcatgtttatgcatgtggatatttgaagcaaaatatgccatagaaacagtatctcttgctcactgaattttaaagtattttaacatcagtagcaagtgcataataaatctttaatgtataatacgaactgatagaaaaatagggctctgcatattttttcttgaaaaacaaatgtgttttgagaaatatagctttgtctaatgctgcctttgtaaaaccgggaagtcaaaagacaaataatattttgattctatatgttatgttgattatatatagtatgtatgtgaatgtgcataactatatggattcatatatgcacatatatacacattcatttatactcatgaaaatggtaaaaatccagctaatgatttaaacattgggtcaatagcaatatataaaaataatattaaacattcagatctttgcaaaatctaaatgggcttgtttttaattttcatgtggacatttgaaattttatagataagactaacaatatgttttactgtactgtgagaatttaagattaatgaaatattatgttattaatttcttacatttgtaaagttgtttttcacaataccgtggcctattagattgctaagaaattatgtatgtcaactctttctttatacaaatattgaaaatgatagtaagattaaggaacttgcccaggtcacaatttttttctttcaaatttcatggctgatttctaggcaaaaatttcaggggcctgtccaatacgcatgaattaccctactataaacaaagctagggaatttaatacataccgaaaggcattttgtaatatatcagaaactatacaaaaccaagaatagtcataaaataacattttaacatttttaaaaaaagattattccaaatgccctcacttccaggaatgcgactttaaaagcctaggctttatgttatgtcatcaaagtcattgtactcaattagacaatagtgctataattaattaaatgttattatgtaaatgcagaattaccaaagagaatttcaaagagtataacagtattaagtcgtttccttagtaatttctcattgctgtgaaaaacatctgtaacctaatacatttatattcatttttcatattatattatgcacatattatttttaaatatttgttaacaggtaattttctgattaccaaagtaatacttttgtattaaatgtttgaagactgcctccaaaaattgcaaagaagaaaattttaaaaccgttataatcctacctttgaaataattattcttcaaatgttagatatttggaatgtttccaggtgtttactggtatagttaatgctgctgtgaacatctttattgcacataccttttaacctctgtggaactgattgcttctttcatgatttctcctatattttgtcaatcatttcctttttttctttttcttttttttttgagacaaaatctcactttatcacccaggctggagtgcagtggcatgatctcggctcactgcaacctctgcctcccgggttcaagcaattctcgtgcctcagccttccgagtacctaggattacaggtgtgcaccaccatgcccggctagtttttgaatttttagtagagacagtgtttcgccatgttggtcaggctggtctcaaactcctgacctcaggtgatccacccgcctcagcctcccaaagtgctgggattataagagtgtgccactgcacccggccaattgtaagaattattttcaaaggaatttatatcaagttacagtgccccagaatattctgttattttagctgtattgaatatcataattttcttaacatgttttgtctttagatggtataaaatactatctcaatattattttccatttgtttgtttaccctttatatttccatttgcttgaactctctgctggaatctttcaatatctacctgatgaatcaatgtttatctgttggtttgttttctttttttttaattaattaatttattattattatactttaagttttagggtacatgtgcacaatgttatacatgtattttatttctttttgtcacataaatttgactctttattttaagcaactatttctagtcttttgtttctcttgttttattaaatttttattgtaaagaagttttgttttggccaggcatggggtggctcacacctgtaatcctagaactttgggaggccgaggcagatggatcatttgagacgaggagttcaagatcagcctgaccaacatggtgaaatcccgtctgtactaaaaatatttaaaaattatctgggtgtggtggtacatgcctgtaatctcagttactcaggaggctgaggcaggagaatcacttgaaccagggaggtggaggtttcagtgagctgagatcgggccactgcactccagcctgggccatgaagcgagattctgtctcgaaaaaaaaaagttttgtttctgtgatagatattttgcttagcatgcttgctttttatatttagaaaaactaaatctattccatctaaaatatattttggtgaataacgcaagatatgtaatctcagtgttatttataaaatgtaccattctcactttcttattttgtaaagcttgtttaatttcagagtttgatatattgaagagtcctattccactgacttaaaaaattgaggcagaaggatccccctcaagtgtcacatcttagaatttgtttgatggtacttcaaggcagttggtgaataatttagaactcaaactttgggctgcagattgcctgaatacaattaatagaaaacaaaatatttcctcaaattacattctttgacattagtaatcattcctttatatacatctcaagtctaaactcccaatctgtttatatgcagagattcacagctttaagatttatgtttcataactgcaatatcactctatgatacattaatgggattctgtactcaactattccattggcattcaagtgaataatttttatacaaaacttcttcaggagacaggcccaactgaagtgtatcactttaaaacaaatatcctatgggcaatagataaatctgatatttttctgagtagaagaaacataaaacctcaatataggattaatagggttcaaggggttttataagcacagtgcttgtgaaagtatgtaattcctattaaggcttgcattcatgagcacatcatggtatatgctctctctgggaatatgtaaagccagtttaaaattcaattacagacattgcagtctagacctccgcaagcctttgcacgtgactggactcactcaggttaatctctgaaccagttgtagagagcttttttcatctctccctcacacatttccaaactcttttctttctgtgttttttaactgtgacttttctttacaaaaggaaaagagaattttttttaagtccatgacatatccaatgaaatcgaaatgatttaatacatggagttatcttaatatcttttgcttcttgacagttctctcatatctatctagaaaatatctggccaaaaaaacccactttactttgtttatgagatattagattattttgtacattttcacattccagggctacaaggagaccacagtagacaaaatcaaaccgtcttccttttctttataggcttgtctcagcaatgcagcactgtaatgtctcttacttgaaggaacttcattctattgtaaattcttaggacaaatagaataaggagatagaagagttgtgtgagttataacttatatgtaattttctgtatatatttggaaagttcaacatcagatattgagtctatttcagtctgttgctgtgaatagaatacactattttatcctattggttcttttcttaaactgtcaaccatggtttgagcatagtttaagaaaaaaaaaatgaatgctttaaataaaaccagtacctgggttggaggtggcaaatatatacaaacctgtgtatgtgtgtttgggtgtgcgtgtaatctgaggattatagccctgtatctgtttcagggagaattttttttacatcagaccatgaaattgaaaggtgattctgataatctatttcattaaatagaagtttatgataccatagactctggaataaaaaattccttaaaattccctatttagattaatgcagatttaatccttaacccattggttcaaaactcaagtttactctttcagtaataacaagaagtggttgtcaataatactctcattaaaaataattatttcagcatttaaaaagtaataaaattggtattttctaacttatatgcttaatactcatccacaaaggttaaataattaagaaattaaagactgtgaagaagaagggaagaaagaggaaggaaaagatggtaatatggatgctattaccattcacaaaaacaacattgatgattaggcatatgttgacatttcaattttttgaatcttggtaaaatagtcattttaataacatacttaccagattacttaaagtaacatttcaactctgtttcagcacagcagataacattctaatccatgtaatcataagtagaaaaagcagaaagaaatagaatcctaacactttccaagcttccttctcttttgttagattataattcatgtacatccttattggggtatgggagacactggaacttattatactacatctcatccatttgttctgtctccatgactgacttctcaaaataatctaaactcttcagtgagccctttaaagtcatggttttatcctatatctgtccaggattttatctcacgttttgcatgtatcccagctcaaaaggattacttttctgaactttcattgcccttggattttgaccttccatatacttgaaattctctctttttaatatcaccaccaataaaaatccatccctcaagacctcacccaattattatttcaaactctaaatgctgatcaactatgtggagctgaccttttcatcctgtaaataagtgttattttctccttaagggatttgccacatgaaaactttgcaaacaaggacagtgtcttattcattttgaattctccattgtgcaatttctagctcactgtcatacagaacattactatcatatttagaggctgaataaatcattaaatggataccatcactgggcccatggaattgacttacttaactcaaatccatgtgaaagtcacttaataaatattaaataccatcaattctcaattattcatggggttattattcacaacttacttgtgatatgtccttaaaggtcatatttacataatgaatgattctgcctatttcattggcataaataggttcatttaaacagatttcattatttaattagctccaatttttcctttaccatctttttcagaaggcaagattttgcttttagctgtcttgcctaaatctgaaagctcatactgatcatttccatttaataagggaagatgaaaagggccggtcaggggactgggatccaaaaggtcaagagttttccattccttcttccatcagatcttcatagtggagttttgttaatttgtgaatttagttcaatgagccaaaaaaaaacttgctgatcaaaacaaagcccctttggtagggaggaaattctgtctctttgttttctcttcctttctctctgtgcgtgagtgagtgtgtgtgtgtgtgtgtgtgtgtgtgtgtgtgaatgtctcctgacatttgaaattcacagtgcaatttaacaataaaataataaaatatagctttttacaaaaggtgtaagcatagattaatgtacaggttttcagagaaggacaggttagcttgcttcatttttaatccttaggtaaaacagaggaagaggaaagtgaattttattgaaattcacactatgtacaatgaattacaagagaactataggaaatggttagatatgattaaataataattattttgaaattaagataaatgtcaaatgggaattatttgctttttcattaggaactgcaatgatgtttgcgcagcagtgatctatctagacagattttggaagatgtcagcaattttgtttagtctgtcagcatttgcagtggcaatgattgggatttacttgatgcattcactctggaaaaaaccttttgtgcacattagcatgacaactggtgtccatgaaatacaagaacaacattcagttataatgcactttacaccaaattaatgaatagtttaggaagggaagcaagagctgacttagatgacttacaaatatctgcttttttgcattttctaaggtagataatttgtgtatatttactttaaaaagtattttgtaagcaaagaaatgactgaaggaaacattaactccaacaaaacctaaattaatgtgtgtcaatgtaataaacttaggaagaaggcggttgcttgaaatattgtagtctggcaccagctccttcaaaatggccatgttttaaaagtatggcaggtgtgctaaaaagtctttattgcaaaatcattagaaagtctttttttgtcagtttaaaatgcattcagctataagcaatagaaaactaacaatggttgaatcatctaagggtttgttggtcttgtggaaaaggatatcaggaggtagcaaactagggctagtacagtgattctatgataccctcaaatatgtgatttccttttattctttcttctgtgccagccatcctcagcatatgggcctgtcctgtgcttgtcatctcacgaccattggcggatactgcttcccacggcacwatctcctcattccagggtaaaagaagagaaatggaaaggaagtaggaagggatggtgtctgtatcagggaaacaaggatttcttaggaatcctcagcttatataaacccagctaccttgcccctctctgacaacctgttctttggcaagaacaatttcatatacttgcccctaccttccagggaagctgaggagcttgttttttttaactagacatattattgggtgattaacattaggcttatataaataagaatgaaagggagaatggatatcgtatatacaatcagcagtgtcagccacagtcttatagttaagtggacaccactaaatttggtgggattagaaaagcaattagttggtgagatataaaaagcaatataacataagggttttcaaacaaaatatcagatgatattacctgtatactattatgttaggggtataataccataaatatgctaaattcagattaataaaaagtttttcactttctgcacaatcatgacctccttttattaaaatagacaaatagtctggggttagtcacacaaagtctatatggcacatgactacaataattgatctgcaacctctctgttctttaaagtgattctgtgatatcaaggagtgttgaaattaaaccctggaagccacagaagatgccaaatggacacattttgtgactatttatagctgatccaaaaatgaaaggggagaatgaggaaactgattgatagtccccaattctgttttgatctgaaatagcttgttaaatgaatctcattgtcagagctagtttaaataataaatgtctctactctccactattccgtgcatatgtgagtctgaaagtaaaagtttgtaattaaagtgactgcattttaaagtttaaaaattgatctcaactaatagctaatactaataaaataaataactgcattctaattttttaattaccctggtttggaagcagaaacatgttttgtacatagctgtaatgttatttcactttaacctggttgtccccagtttagtatctacgaagctttgcacgtatcggaactccatacctgcttctcccttggtttctcttctcagtgataaaggatttgacttctttcttccccattccagcttgcacattcctgaagttttccggcttggaacaaattatattactaggtctgcagtatcatttagattgagaagtattgtgatagagcaaggttcaccctaagtattgactcttagaatctgctcattccatagtctgttgagtgcctttacctgtcactgttgtcctaagcaccaggagtgtagcgatgaaggatttctagtcctagttatctaaggactcacaattaggtttctattctggggctattttgtacatttgtgtacaaaagactgcatttttaaggtgtctgacttttgacttggtttcagaaggcataagaagttggtttcatggttacaaccccatgcccagaaaagttaagagtggtatttttaattaatttgtaactagaattaaatatagctagaattatataggaatacaacaaaagattaagatgtatatacatccctctgaataatataaatattgacaggctgatattgggttttctagacttactttcgtaggtattttcttagtatgaagatagttaaaatatactaagtgaaaaaaaaatactcaagtcactgtattagtggttccactagtaaaactacagacctcatctgtttctggaatttgcaattttaaatattgatttttggaatgtggcgacttacactgcctacttttagtttgccaggtgagctcatttttgaaaatatcctatactctgcatttatcctttgataaaatcatggctattataaattttaaaaatggtaaagatcatgtcagaataatgaatcgtgcttctaatttgataaatgtagcttaatcacaaatatacgaaactttctgttggtctggtgcaaactttctcaaggagaagatttagtgtttcagaaccattggagtagatgctatattaaacattgaggctctctcacctttaactttataaagctaaatatagtcaacaaatgaattggaaagacatattagtaaaatctaccgagtctaggcaggcctatgtgtcaggccaagatgcttcctggaattattctgttcagaatgattcctctttctttctcattctctaaagataggatgtcaacagtttcttcataaatgtaaggttataaaccatgacatttgtgaaactattgcaataatcttgggttgtgtagggataggatgacattttcagaggaaattctctaaacactttcacattaataacatctgggagccataatattataagcataagaagtggatctcatataaaaacataaaatatttttttcacatttatatgaaataacatatgtacttgtaacaactgagagtccctgatcaaattaggaaatctacagccatttattttaaatcttgctctaccaaaattggattgagagacaaattaaacacaaatcattagttacattttataactatagaggatgtgcagaaaacaaatattcaaacccaattttatgtactatattgtgccatatagtcacaggaaatctgttttccttctaaattattaataatttaaaatcatgaataattgtttatgtaagacagctggccaggctattaagggagtacagctacacagtaacaccaagagtgaggtgtccatctgagctaccacatggagaaagagcagctggctttgccccaccatattcagttgaaagctgcttattactgagcatttgaataacttgaaaggagagaaaaggaaagaacaacgtcagggtagaatgtttacttgtttgagcctcccaggagaaatgccatacaaagatttgacttgatttttaaatcaaaccaaagatctttcagattacattggagggctgaattgaaagttaacattgtataagttgtattatttttatgttcttttgtattatactatgttcccttttatattatgttcatattaccatgaactttagagtcgggatagatcagagctcaagtcttaatgtcatctcttccaaactgtgtgacctgggaaagacatttaacgtgtctaagcctcaatttcctcatctatcaaatggggataatatgtttactgactacaaattaagtaaaataagacctacaaaactgggtgctactgtatgataacacaacagttactacagatgctattattattaggtcacgtgtgtgaagagaaagtaaaaagaagacaagatgcaaagataaagaaggcaaaatgcaaagatcctatttcaatgaagccaatagtagtctttcaagttgctgttccttcttatttctcttccttccaataataataattcctattgtctaccaagtattgagagcctgtcataggtcagacacatggcatgcattgagagaaagagaattcaaattattctcttgaacttttgagcaactctatcaatgggtcttatttggttccatgttactgctgagtaaaagaacatgctcacagagggtaagaaacctgcccaccagcaccttaccagtagacattagagtcaggactttaaacaggcttttggactccagaaaccatgctctgcctactcaaatttagtagctgttctgaggatctcattctcacttatttccccttttttatttgtttgtttatgttctaaccactgatttgaaacaaattctcagaccagaaatttttactcctgtggaaagagtaattggatgttctcattacaatatttttttcttcatgaatgtaatcaaacatcagctggaagcttgcttttaatgcgtggataaaccagcccacacattttattttccctgaggcgtattgctgggaaaatctatttctgattttaagaaatcaacatatgctgaaccaactgtctattttcatttaaattgacaggagctgagactcaaaaattatgttgtattttccacttctaacattgttgatagaaaagttgaggtaaacactttattctgccttagatgcctgctaaattagtctctctaagtaaaaatgtcaggaggctattgttggattaatttaggtggagttgatacagttttagggaagaaccgttctacagtatgagaacaacttttaatattatgttagttataatctggagcatttatcataccttattatatatcgtatgttttgactttctcctctattgggctgtgggctcaattaagataagaatgtatctcccttatctttgtatatcggtgcttagtgcattgcctggcacatagcaggcgctcaactctgttgaattaaatgatcaatgagttaaactagatggctatatagttgatcttctatatagttgatcttctatattcaaaatatagtttacatatatgtatgcaagtgtatatgtgtgtttatgaataagaagaactatatcttcatactgttgaaaagttatattgtttctcatacagattttattcctttagctaaagttgtatcaatattaaatttataactaaaacgatattacgttggcacatgagggttttagtcagctccagctgctacaacaaaatactataatctggataacttacacaacaacagattaattttctcacaattctggaggctgaaagttctgaaattagggtgccagcatgtttaggttctattgggggccctcttcctggcttgcagtcagtgccttctgacatggtggagaaagagcaagctctctggtgtcttttcttataagagcaccaatcccatcattgcaggccccaccctcatgatctcatcacctcccaaaagacccatctccgaatactattacataaagggttagggcttccacaagtgaattttgaaggggacataattcagtgcatagcaatgagtatcttgtaggcttatgaccatataatttgaagctatgatttatgtagaagttggacaaaaatgtttcacataattagttatgttcacatgatctaatgcctgaaactcatttttaaatatgcctgaaactcatttgttaaaattatagtgttgggaaaagaagcatttaatatttgttagcattgaacttaaaaaaaattaaacacattgactttagagaaatgtatatgttgaagagtaggtgtggatgaaatgaaagaagagagctaacccttctcagtgccagacacagtggtgtgggcattaataattcaaccctcatagcagtccttagggtggtcttaaccatttcatggggaaattgagactcagaagtttactaatttggccaaagtcacataattgtttagagactgattcaaatcaatgtcttctttattccaatcaatcttttagggaccttatctgttatttatatgaaaaaaaacaactaactttaatgtttatggagtttgtttaattaaataaagcccttaggatttcaaattgtttcctaagtccaagagatcccaatgagaaggaacacaaagtaatttttaatgatttaaagtaaatgctttagactgaaatggtagcttctttttaaataacatttcaaattaggtttactattaacatttacaaagaaccagggctataaatcaactttatatgcagtgcattccattgatcttaatagttgtatttgcaagctgagtagaagagatttacagttctctctcaagggatagatctccttttttgggcaatgaatatactccttcagaaagtcctcttgctcttttacgtactcttttttgcttggtatttcaaaggctttttgttatactttaaaaatattcaacaaaaagtcactgaatatctacaatgtgtttatatcttgggtgtaatgcctaggttaataagatgcatagaaatatggacccagtgctacaggcccagcagtgagcaaaactcagggaaacaagtgacactaaacagtgtggagaatgcaaaggctaaaggctatatgagtcctggcatgagcacggaggtatgggctgagcagcgctgcctgaggaggtgatgtacaagtgggtatttatcccccccgggcaaaccagaaggaaaggtaaagccaaggaacaaagtagacaatggagatggtggggaatggagggagaagaggaaagaatcttggagagatagtcagtcttaaggtccaattaaactatttcatggcagccattattatcctgaattttatggatgaagaagtgaggttcaaaaatattacataacttgccctgtgtgacaaaataaatgaaaagcagagccaggttcaatgaaagtatgtttgacttaggttttaaaattctagtcataaatggcaatttaatgttgttatatatttgtattgggcttcagcaaaaacaaaaataaaacctcaagtacacaaaagctctagtaatagagccatgtttgtgcagttatttccagcaatccttggaacctccaaaattctcctcagcctgacattatatgccctatgtgtcatttcattatgtcaccacctggtggtgcactcacacccactttgggagaaagggggttagagaagggaggacatctgtggacaagccaataaaagcatttactggcatcgtgacttcataatttacacttttatttatgcataattaagtataaataaacaaaaacatgtattttctaactgctacctgttctgtttccagtcttgcttgaaaatcatctttctcaaaaaactacctatcatgtgctatgcccattacctgggtgacaaaatgatctgtacacccctacaaaatgcaacttagtcatgtaataaagctgcttatgttccctctaaacctaaaataaaggttggaaaggaaaaaataaataagataaaaattatctttctctatcagagtaatttgacatcttgaggaagtgatcctgggacttcatattctttaggattcaggtgtccagataatcccagaagtagccagcaatttggccatttggggtgtagaaaccttcatacctaggttattgtaatacctcaggctattctctccaggtttccagtgattaattagctgtgaacctcaaccaacacctgactctagaagagtcttcaaataggtcctagaaggaccaagtaaaatcaccatccctcaatccctcaatttttcctttttccaagtcaagaataaaagaagtctgggaaacattgccaggtcagcttctttttaagctcatgattttctgctacctgagggaaggagagaaggaaaaagaaaagaaaagaaaacctcaatgaatgctccataacctggattttaatctctctttccctttttgggataaaattgtttaatgtaattaactacaaggagaaaagttaaccagtggcttctgcttttgctgaaagcactttttcaaacccagctgtcatgtcaaatgcattcaatattagtttggacaactccttacgtgggtctcagaatgcatctctaaagaaagtgtttaaatattttttaatgtgaaaacccatatgggtattttggtgataggatttcttctatgattcaggaataaagtataatgcccaaataggcccttgccattcctatcagggacattgcatccataatccattttccatatccgtttgtatgtaaatgaaaagtctcacacatcacaacttctgtttttctcattgtaggatcgcctcatctgtatttatccacattagtaaaaattatccaaatcccagaaatataacaatagtccgtatttcttgagcatttactctgttctaggctctgtgttaaatgctttgcatgtaatgtctcatttagttttaccacattctatgaggtatttactctccttttcttatatgggtaagaaaacatgttgagttattcaggtaatttgcctatattcacatactggtcatgagaaaactagaggacccaggagattgaagcccatatttcatcatttgactgtcctaggaaacgccttgtatacttgtttttttaaggtattctgtcacccaagaacattgaaggtatatgcagattctcttttcctgttctattccactagacctgaatatgagggatgaaaattgctttggttttgatgtgacttcagtaccttctgtatttgacacagaggtgagtcacatcctgatcagtgttgaaagcatttagtaagattattagtttataaagaaggctgaaccatgactatataataatgaagcaattgtaaaaaaatcagaaagcattcacattcattccttgaatttccaaaagcattcaacaacagaaaaagggcaaacacgtttattccatgtatatatactgaattcctactatgcaccttcaacaataaaggcttttggtatataggagtatactgagcccagttagattcaagtgaaattcctagtaatgtcctggtatacaaggagcttaaatgttcaacatataacattgtttcttatgataggtttcacctataagccctctaaactgtttgtaactctataagaaataattaataaaccccaacaaggtctatttaatgtcttgagacagatcattctactcactttagatttcttatagataataaccagcacctaaaacaatttttaaagacataggaaatccagaataaatataactatcataggaacatggaaagaattaaagaaatggcagaagttgggaaaaaaactactggaggaaaagggtgaaaatgtgtgacaatgaagatttgcaaaggttctagaatactttaaattaagttagaataaacttttagttgcactgtgctttgactttttattcagcctaaattgtccttttaaattcaggttgttcatctccaaggatgaatgtaatttaactgaatcttgtattagagacttgcacatttctcactcattaatatgatcaaaagcatcttatttatgtcaaaagacgagaaacgaaggccatttttggcattgtcctaaagttgtgctttcttgccttattagcatttcatttcaagcaatagattgaacagaaatgcttgtgattgaatgaagattaattatagggtatgggaatattcaaacctttttaattgttctgagtagtgtcttctgctgttttgttatccaaaagggagtaagtatttggggaacaaagattgtgacacatctggtaatattcaagatgcacaccccctcactagactgtcaaaaggctgggcttgtcacagatgtcgaggctgtgatgtattgtcactcttgctgcacccatggatgcgcctctcctgatatgcgactcccattgggaatgtgaagacacagaggagatttttaatcaagagcataggtaggagtcaatgatgcatagctggcagatgcagatttcagcctgggaatatttagaataatttggattgctttatagtttatagtagcatcttttatgcaggactctgacctaattatttcaaaaattattgctactgattataatctcattgttgctttcttttatctattcattgtttaaacagcatttttagggggcagggtagggagaagcagtgtagcttggtaataaagggcatatgatctggacccagcctaccttggaaaatgattaagccccaattttcctatatgtaaaatggagacaatactagcatctacctcacaatattgttgattgaatgaaatgagataatataagtaaattacttccagtagtccctagcacataagcactcattaaatgttagcttttaaaattgtattccagattaacatgcctaaaaactagggctacgtactgagaattcatagaaccaattttactttgtgtctgtgttcttatgcctgcatcaggcattacgaagaatacagagagacaaactttctattcctcagggttgacaatagaagagaaataataatacacaggaaataagtaaaagtataattcaaactccaagtttaatgatgtataaaatgaagaggtcagtttgggctataacaatcagataagattcactaggtgctaaactcgatctaaactgagaaaaatagacaagacttataaatattagtttaaaacataaatctgaaagtgttactcccctatattttagtaagacttctctgtggcccttgctcctataacagtttctttaaggttaaaactgctgggtttctgagctcttctccatcctactaaatgagaacctctaatacaagaggacagtgcttggaaatctacatttgtatagaacccaagtgattcttatcaagcaaataatggaaattctatcttagagaagtctaaacatactaaggcccttgtttagactctatgtaatttcattttcagccactctgggccttgacccctgagaaccagcaaaagagaactttcttcagcacttggcttagccctcccctcttttgtgaaggagtttcccttcactggtcagtgttccttgtctttaatgatggtcttgaacaccactatgttgttgtacttaaaacacagagttgtaactgtttacaggtttatatccattaaaccacttgatcttgtgtttcatgctctcttattctcaccttagcatttagttaccactcactaaatcagttgatcttgaaactttagaaatcttacccttacctgaggggtccttgtttacaaagcagatttctagatgctcttgctcaggtactcttattctgtagttgaaatgggcattttagggccagacactttggctcatacctataataccaacactttgggaagctaaggcaggaagatcacttgagtccaggagttcaagacaggcctgggcagcatagcaagaccctctctctacataattagcctggcatgatagcacatacctggctactcaggagactgaggtgggaggattgcttgaacccagcattttaaggctgcagcgggccacaatcatgccactgcactccagcctgggcaacagagcaagatcccatctcttaaaaaaagtgagcattttaacaagtgtgtaaatagtctaccattctcttaaaacacacacaaacatacacaccttgaaaatgcaaatgaatgaatgtgtgacagagtggaagaaacagcttcagaagggagaataaacatagcatttacagaagatagtgagaataccactgatttggtatgttggatgctggttgggagaattttatgggaaaaataccagttgagtgaaattatggatgttcttgagaaatagcagagtttgaattgaatgtggctttttgcataaagtggtaattttggaattttggaataggagaatgaataaagatggcatccccaatagttgtcatggctagtcttaggaagggttggatcagatgatctctaaaatatctcttaacactgaaatgtatagtgttatgctataaaatatgtagatattgagttgtattaataaagccttagcttgtattcatgggataaaacttctacttaaataatattgtaatttcattcattaatgcatgtgtataaaagtggatcagtattgtggaaggtttgcttaaggtgagatacatgcaatggtagcctggagccaggtagtagtaccagctcaggagtactaactgttacgtattcaatgattttgagacctggttggaaagcacaggcattattaaattatataaacccgtaattaaataaattatatgaaatgcaaaggtaatcaatactcaaaactcattagttcccaagtacttcattatattttactattatccatgctcttgaggttatgtagtccatcgtatctgtgtcgtggaaatactatataatgaggtgcagctacaaatctcttcccaactccacattcagggccatcacattggtagcttgaaataagacatgctgatagtagttacaccatggaaatggacatactgcacaaatcaggcctttttttttctcctggagagccaactgataaatatttaccagcataccaatggctcatgtttagaatagtcccattgttttggggtagaaattcattttggtacatggcctgactcaaaagttcacccctttagtgttacctcctgttcagcattgaagccacttatgtctccttatatgaaaccagaaacaagaggctttttttttttttaattctaagagtggctggctttagttgtaacagaagagagcaggtacctttattgtacttcaatttaaactcctttcaaaaggatctgagaactttttcaaaaaaaatttattcccccaaatctgataaatatgcctctattttacaatcttttacaacttttcaaattactacaatctgaaagacattttcaatctttcttgaaagacagggagaatattgccatggatgaagaaaacaatgacttgtttctttcattgtataaaatcattcttcatcactgtgaaaataagaaaatgaattttttttagttgagcacaatctcgagatctttctaacagcctctgttcttacagtatggatgttactcttggtttatagctctgcaaaggagtcaaagaatcttccttttatgagggccctgaagaaagaaaattgtgctgataaaattactttatgtgcgtttgaatgatgatatggccaagcattcttcagaaacttctgaatttttcatgtatgccttcaagagttgtaatccttacttaagcaaatgtctgtttaggagagattccagagattttcctatttagagtgttttaaaaattaaggaaggtgttcaccagcttactagaggttccttgtgaaaagagaaatgagttttcttcaacagtcttatgtctttggttcaagctgacataattaaggtgtaaacatatcagtatagtttgttttgattaaactttagatggacatagaataggtaatcaaattcattggatcgaaataagtattcttactctgaaatgaaacaaaatggaatcttcagaaacatggaaacaatgacccaaacatcagagaggcattgaagataaatgggaatatcactgggaatagtgtaattggagcagtgttttccaagcccaatcctcagacctctcgaaaatggagattgtaacactagattgtgggcagtctataccaaaccaacagtactgaatcagagtgggttatgggaatggctagagcatttgcaattttacagcatattcagaagatttttatgtacactgaagttgagacgtgctgatttagcaaaggtaactgacaatttgcctcaattccctcatctgcaaaatggggattataaaagtagggttgttggaggactgaatgagtacatatatgtatagtgtttaggacaatgtctgctgttttacagtaagtgctctattgttggctcttgccactattattgttttgtcaagggcttgtctgtgctagctggaatggaaacttaaatgtttctaattattgcaactgtcagatttcttaaatatcgtaatgaagccagcacagtgaagagctgtcctcagtttaatgtaacattggatctatcctaataatttttcttagtttcctattgcatttgtaactattttatttaaatgttttatttttccacagggttacatttattttattacttcagaaatattagatgtcattctgaaattgtggctgtgcctttatcttgcatgtggaattcaattttttatattctttacaaacagtatttataagaaataaagataaggttacagtgagttgtagtatgagatggtaatttacatggggtgctccatgtgcttagcttttctctgaagttatgcatccccacagcaagggaaatatttgcatttctgagagtgagaatttatgttcatcctctactaggaatggtggcagcttttccaggtcaaggccctgcagatgcctgatggtcatggtaaatgaaggctggatgcagggaaggcagcaaaatgagaaaatctcctgggatcaattaatgggagtcatctgagagagaataaaggcaggagaacattttcttctagtcaggaattcgcatcagttttgcctggtaatgggtttcatgaaagccaagatgaaagggttttatccctaaggaaaaaagggctctcctcacatcctctttctgtgctcttttatcaatgactaataataacatgcttgcatccatgacaatctttcagaaaactgatgcaaaaacaagtccaaaattagagtgtacagctgtcgtgatttcctggagtttctggtgtgtgcttagtaggcacacagtttgagttacatggcttcattatatgattacacactactttgttgcctcattggtggttaaggtgattttaaacttttcagtacccaaaagcagtgtcctggaacataccaatgaagacggagaattgtttcagtcccagagatatcccaagcaaatacagcagtgaactcaatggatatttgtgaaatgaataaataaatgaatgaatgagtactactgtgaatattcttgtcatgtttgcttgttctcatttggagagtttctttgaggtccgtgaccagaggttgaattgctggatcttaaagtaagaggattaccaacttccctatacgatgctcaattcctctccacaatggctatactagtttactgtctggcaatcggtgtatgagggttacctgtttatcacattgttgtaacatttgattttgtcagatgtcaggttctaactgaggtccaaggggagttggtgggcaagtggcgggtagctggaaaaacacgtgaggaactgtagacagtttcaacatggatttactctctctctggccatgagccatgagcgcaagatgtatgtacagcgtcagcagcgtagttgtaccttttacagacaatagtggctccaagccaagcacaagcttacatgggtgatcacctaatgtgcctcacgtggcgtggttacataatgtgcagagttgtgagcctgtgctccaaactcactgagtcatgctggaccggatgtctgcttcggcctatttttgagagcagcacatccattttccttacactccaccctcaatgccaaaggagacacaggccttggacacacaggtctaagacacaggccttatacgtacactctggggacaaaggccctggacacacaggtctgacacataggccttaaattctactccctaggctgaaggagtcttttaaatggagaaacatgcccacagggtggaaccccagacccagaggccacagcagtaatacaaggagcaacaactccaggttatgacgggcaaacaccccatgatgatgttacccgaatttactttatgcattaagccaggtttttatttccctacctttaggggcattggggcatgcaacaacaggttaccatccgtttccatcctggtcataggaggtcatccttcctcccataggtcttgccacatggcctagccccacatgggccagtggccaactagccacttctgtattttccaggtgcctaaccacaaggttaagcctcgatagaccacacagctattggtgcagattatcatatgtgtcacctctttggtgatcaccattcatattgctctgacttcagcccattgactactttgtccatacccggtatgaaaccatatggagtcagtactaggctggactgtgagcagtccaggcagtagcagcaccccagctagacccatctgtgtaccgtgccccatcgggcatagggggggatgcccttccttaaatggtgaaggctcagcatgtaggggtgcttcaggccccatgtccttaggccccatggccttatcttgcattaggactgctggtctcaagacctcttgcaactctgctgctaagggacttgtactcagcgtactctgttgcttcaagtaggtgccccactttgctaaagtggatgtctgcactgtcccagtccggggggttgttatcaatgaacacatccatcctgctatcaggtaactcgtctacacgacaactgtagcctgtcctgccatgctctcatgagcccgaagggcagcatatgcagttactaactgcttctctatcagtgaatactggagctcagcttctttccatagttgggaccaaaagcctactggtgttctcaagcactccatgctctgccacaggccccagccaaaaccatctgtggtcacatgcacatccaactcaaatgagcacccttggtcaactacccatagggcttgtgcctgctgaatagcctatttagctgccaggaagtcagtctcagccacactatcttaattctaggcaagaggagcattgccgcttctaaatctgcaagagaatcagaggttaacataatattatcaataagaccatgacatatgatggggctatgcatatatccctgcagcaacactatgaaagtccactgtcaccttcccgtgaaggcgaactgttcctggctctctagagcaatgttaattgaaaatgcattaatcaagtccaccacatagtggcactgtccaaattccatcatcaagcggtccatcaaatctgtaatagatgggatggctgtcaggccatgtaaaacatccacccccagaatatatcagcgctggtgtttaccagtgccagcacttgctgtatgttggtggaggaccagtggattgctaatttcacatgtggcctctatttgtctggtgtccccccaggccaggcacctcagccagttccctaatcaaacagaaaaagctcaacatttccacctggctgcagcaagtagtctttgagttgaagcacctgagtgggaccaggtcatacagcaatgtcctccttccccttctgcatttcctggaattgctgctcttgagacagttatctccacaaagttaaragtacttcattgggctgcttatcgattttctctcagtcaaccctggccaaagtcaaatctatccacatctgtgagtgggtcacttgttggggcccccttttcttccatgatggggaggctctgcaggtggggcatcttccccttttttacagtgcagacccagaccaagcaggggtctctggctgagatgacggacccaggcctgcattcacaacagcctctaactccctttccaaccctatgccaggccttcaggcaccccacctgcacctggagatccccattcatggcagcctctaactctttttctaagctgtgtagctgggcctccaggcaccctgcctgtgcccaaaaggccctttcctgcactgcatccctcagggattgggagtgtacttcttgtagcacagaaaaaatgcccatccaactctgctgtcaaaggctcattccttctcggtgctctgcacttccagctgcttcagtgctttctccgtgctcgtggggtacccatctactgctggccaggtttccaacagagttcacccttgcagcacagctgtgaccaggtaccacaacccatgtcgtggccacattgccaacccagaatcagcagggaccaaaggctcgcccaccttgggatcctgttcgtgatgccaattgtcaggttctaactgaggtctgaggggagtcagtgggtgagtggtgggtagctggaaaaacactagaggaatcatgcacagtttcaacgtgcctttactgtctgagtgtgagccgtaggtgcaaaccataggtacagtgtcagtccggtagttataccttttacagacaatagtggctctgagccagttacaagctcatgtgggtgatcacctaatgcgccttacgtggtgtagttacataatgtgcagaattgtgcacctgcactccaaacttgctgagtcatgctggacctgatgtctgcctcagcctattgactgcagcgcatacattttccttaaatcagatttttaaaatttttgcctgtcagatgaggtatgtctgtcactattgttttaattattttttcctaattgctagcaaagttgcctatcttctcaaatgttcacttattgttttttttcctgtgagttcttgcatccagtttgaacagtactatttaactttgttttaatgctgtcaaattcctaaaatagttgcttatgtcacagaagttctaacctcagaatgatgatatccatgccaaagcagttgaaatttaaattcttagataagtaactttaaatattccagtgttatagtaaaacatttatactggactattcactcaaaaattctttaaacagttgtcaaccttatttatttcattataataattgtaactttaaatgtgagatatgataaccacatctctgaaatgtgacaaccttgtccaccaatgttattatgcctgaaacataaatcttgggcccctgctcagaacctttgccttctagtttcagtaattatgaaattaattttgtgtttggtgttttgcaaattaaacttaccctattaaccctatagcgtatatacattatagatmtattattataattattatatttttaaaaatagctttatgctcattgggcagaatctgtatcagcacattttttggcagaatagattcagtagactaataactctgttataaatccctggtagcaatgttgggtaaattcagtggactaataaatctgttataaatccctggtaacaatggtggggttttaatgagtaacataaagaacttagaataaaacaacttaaatatatatatatatatatatatatatatgaataatattaacctttattcttatatttgtataatgtagttatctgatttgcagagggagagaaagagacagacaaatggatagacagacagaacgagatcatttagaccataaggttagaaaaatattatgagactatggaaaggtaatgaatatggtagagagagatggagctgaagattataattctttacttatggactgctccaggataactttgtttgatgttattttagccttctgatatcagtttatatactctaaaacgagtagaaaagaagcatcagtttgtataaatattctatttaaatattgtcaaagcaggtccatgcatcagaagtcaaattaaaactcactggggaaaactttgaaaaggcctgaaggaaatgtacttgatttttataatgtaattggcaaaggaaattgtagtcaaatatgagagctaatgaaagagtgaatggataagtaaaatccacaaataagcacaaatgtcattgggctgtttccctttccttaccaaagaaaatttcatgagagttgctaatgaataagatctgaacattatataacctttataagcattttcctcaaccatttttttctggttgagatgtcaacaagaagtaatatatcataatatacaaaagaagatgcatagtgtattaataatatgctaccaattaaaaatcgctggaataatttggcattggaaatgatgaaggcataaagagcagatcttgtattagacaaaaactaggaagttatagttaggttgtagtaaatgatgaacaatccattttgattgtgattcccaactagcttttaggcagagcctcaaccacagaaactcaatcctagtggataaaaaatatgcagacaatttgaagggagtgaagagagcagaagaaagtatgatgaaagaattgaaagattatgcaacagaggagtatttacagcctggctagataaatgaatggatatattattttttttaatttttttagctaatttacattgttaatttttatttaactattatttttaaaagaagataaatactgcagtggaaagagacttaagggattatactaagggcaattatgagaactcttgggacaaaataatggtcttatatcaacaaaaattccctggaagtgtgatatgtcagcttgcagaaaattttcccaatgtagtgataagaattctctgaagacataggcagattgaaaagacatgaataagaaacaatgtgagatacatttccatacttactgcagaggtaaagcagaatggaatttgtatcttttcctctgcaggtcctattagagaagacaatagagaaccctctaagaggtgattgtcaaattggttaatatgctgtggtttggagtgcctgcattgtgaacaagggcacattcattcaactttccacatcttcctttccctgtaaaatgtacatggagttatggtaccttattaggctattgttagtatcacatataaaaccatgtaaaattcctaccttatgcctggttcagtcagtgctcctcaggtggtagctattggttaaccctattctttataacataattgaaattaggttatatgacttttaaatatccaaacagtcagaatagaaatattgatgagaaattttgcttcatctcaaaaacagtgttagaactacaccaatggagtatttttctcctaaaaggttaatcaggatatgacatttataggatttacaatcacaatcctgataactgtgaaatataatatcagactgtttcttactattttatttttaacattgacattaagttaaataatatattttgttactgtagcctaggattttattttccctgttatgagaacaaggataattattttacaaatgaaattttaagggattagagtgccatagacatgctcattgcattattaatgtgcagaatactggagttctgccatcttcatgaatccccacattacattttggataaagaataagttctgtatataaatgtaggcttcagaagcttttgttgattctttcaccatattttatacaaaggctttcttgctttcctgcctctcatgctaagtacaggcccttcctgtactttcggctaaacgagatggcctttcatgtataaaactcagctgaaaaattgacttcttcataaaaccattcctgtttcatccctgactcaaggtcctgacttgaattcttccgacttccctgggcactgagccagcatagttctggttcgttgtwtaattgtttatatccttgtagcatattcagatgcacatagtcaccatgtctcacccagaatcagaatctctcaaggaaagaaagcatgtcctctctttccctaataatccccaaagctctcaataccatgctgtgcccacagaagggaatcagttaaatctgctgcaattgattggaaacttcttttcccccagattttccttaggtggtctcctgcagagttctgtctaaagtaatggagacttgggatttgtattctcattatgctaatggttattacttcctttatttttgaaaactggttgtaggatctaagctaaccatgctattttctgcataccacccagcgattctcatttagcaactgccttcaaatcgtctactccctttggtctcctcctcccctcagtaggagaaggatgagaggaagttggaatatttacactgagatgagatccttgagcacttgagccctgaggctgcctctggactaacgtttctgttcagctgtccccaggtttttcaacaagagctgtcagaaacaagtttgtgactaaagagcagcttcatctgtaacttctgtttcttgctactccctgctgtgtttctggctatctggaagcttctcagcagggtagcaagttgttggcgccactaacacctttcctctttcaaattcatattcttccttgggaggtgagtttgcatttcagaaaattctattttagtgaaaccacccaggaatcagtgtcagttggctttcagctgtgaaataactgcagagactttgttacagctaagggggtgcgattcttttggagagtttagattttctgtttatagagaagagttcttaggaattttatgcttagctgaaagtattaaacacttttccttatttcctcaacatgaattctttttcccggggctgcaggggaaagggctctgatcctggttcagtctctagcttgatcattttagtcgagttcctttacttccatgcaactctgtttcctcaagtataaaactattagttgagtgggtagaagaagtagatgatctttaaagcactttttaagtctaaaatgttatgattctgctatcaaattcacagcttctcaacatcagataagggttggcatgagtgttgctgaaaatatatttgggttggaggaagggatatcctcgattaaaaaaaaaaaaaaagccagatgagaaattaagacttttcagccaatgctattgacataaactcagggtgactttcacgtcctaagtagaagtggaacgttcattaattaaagcttaggtaatacctctttatcaaaattaataatttatgttcaaattaatcatcatgaattgacatagctaatttgacccttcatggttatcagagtctttttggtgaatatcatagtctacattaattgaaagaggataaggtacataggtgtcctctcccacaactaagccatcatgtctaatgtagtaatgaaagcagattttggactgaattttgttgactggcaagcttttgttaccaaggagccacaactatcataaagcctattctcataagctccatagactcccagctttctgtcccttagacattgtgataagcgtcttacatggaagatcattttttattatgtctgtttgattcttctctctttcttccttattagtctagctagtagtctatctattaattttttcaaaaaatcagctcctgtattccttgatttttcaaagggcttttcatgtctatctccttcagttctgttctggatcttgtcttctactagctgtggggtttgtttgagaggacatgaacagacacttctcaaaagaagacattcatgcagccaacaaacatgaaaaaaaagctcaacatcactgatcatttgagaaatgcaaatcaaaaccacaatgagataccatctcacaccagtcagaatggccattattaaatagtcaagaaacaacagatgctggtgaggttgtggagaagtaggaacgcttttacactgctggtgggaatgtaaattagttcaaccattatggaagactgtatggcgattcctcaaagatctagaaccagaaataggatttgacccaacaatcacattactgagtatatactcaaaggaatataaatcattctgttacaaagatacatacacaggtatgttcattacagcactattcacaatagcaaggcatggaatcaacccaaatgcccatcaatgatagactggttgaagaaaatgtggtacatacacaccatgggataccatgcagccataaaaaggaatgagataatgtcctttgcagggacgtggatgaatgttctcacttataaatgggagctgaacaatgagatcacatggacacagggaggggaacaacacacactggggcctgtcagggagtggggtttagtgagggaaagtattaggaaaagtagctaatgcatgctggtcttaatacctaggtgatgggttgataggttcagcaaccactgtggcacacatctacctatgtaacaaacctgtgcatcccgtgcatgtaccccagaaccaaaaacaaaaaaaataaaaacctaaaaaaaatcttatttcaaaaacaggctatgggctagatgtggcctgagggccatagtttgttaaggcctgggactagaccaacatatgcatgtgaccatcttgtggatgagtttccacaagactgagagctccataaaggcagagactgtattttctcattttttattcccctcagtgccaagaaaaacagtaattcaataaatgtttgttgcattaaagaatttattcacgaagagttataaaaatcaatccactgtttttccatttgctatctctgaacatgtactatgtcatttttacttgaagatatttatattgaaatctctggttagtgatgtctcacttctgtgtacagctaagaagacgtacagtttttaaaataatgttactaactgtaacaaaaactattttatcaagaaatataaaagaaattctttaacaaggttgagaggttacttcatgcattaagtttctgctatcttgctgatgttctgctataaaaccttacagacactatgtctgtattactggtttcatttgaaattttgccttatgattaatctaatttggtttcattgtccataataaaaagcaattgagcatcactgatgtgsataccattttctttaggttttaagaaaaccactctaatattttttcagggccattattttatcaaatatgtatatatgtgtgcataaggagarggagctcggaaaaggatttatatttccttatagtcaattttatgttctttctaccctaccactagctccaccatattgaaaatatctctataaatatgggttatgtcctataagcaaaggatacattctagaattcatttctctctaaaccatgaagcatcatccttaagcaagatgctaaacctgaaacctctgtagagcacatttgggtagacttatgttctcattcttgcctagaagagagatatttctagttttcttatttgctaaccttataatttgagcacagaatgtcagatttgtttcagcccttcgatttaatcacatcatgtctgatatcctagcatttaattacccaaattcccagtgttgttcaagaaggtaggtctgtggtgggttagccttaagctagtggctgaaaaggtcttgatttgcccccacatctaacctagtcacttcctgagctgaaactcccatatcacctggggacaagcgaccctgaaatcctcactggccacagcttcttctgagggaagctgcaggaaaaagaacaaaaatgagcttttgtgaaaggattaacttgggtgaagaacatcctccataaccaaataaatggaacctagtaacccacatggccaatccccagggcactagtgtctttggggatatcagggtgtgtatagaatttcgtttttgtcattcttgaaaacataaaawaatctctgaaagagtactagtggtcaaggtactagtctagagatggaccaaacaatcatattaaacctaatttaatctccagaatttatattttgagattggtagcactactatcttcattttgtactttccccaacttcctgcagctaggattcaaatacagaccatctaactccagagcactgccctttaacattgtgctataatccaccactttgcatagttgatcctacaagaggataagtagagatcaaagtaagaagtgatcaatggattactatgtcaagcatgattccctcaaactattgggaagaataaataccataacatgtatagggtgctgtgtacaattcctggcacaaagttaagtacatgataaaatggaactattaatattagtaacccagataggttctgggcacattagcaggaaaggtcttcttaatttaagtaaggtgctaaaagcatctaattttattaggattgttatgaaacaaaaactaaatgtgcaagaaaatatatttaccgtagcctggggaaaattgtcatggtttctcttttcaaagaattcaatttggtaagaaacagccttcaatggtccatgaaaagtgagaagtgtagggaataagaggctctttcctatgtttgcatttcaggcttgccttcttacttttaaatttatctttacaattgccttcctgctgggtttgtgtcttcctcagtttagggaaggtgacaagaaaagtcctgtttgtgtgtaattgacatgaaaaatggtaggcttttaactcaaggaggctccagacaacagtttggttattaaggaaggggaggacctaggggaacaattgtttctggcctctcttcttctcaggcctggaacaatctttcatttactatattcttgccacaagagcacagtcaatattaaattccaaaaaaagaaaaatccctcacagaaacagctgtgttcaatatacagccagtttactctggcgaattgctagacatggaacagttttcatttctttttgtgtttatccctgatagttgtcttgtaaaatctgccttttgtaaataagggaaggctggttttaaacagctttgactaatattggtagttggagtattcagtattacagagttttagagaactaaaataaacctgatggaaacacacacatatttcaaaggaaacattttaaggtgttctggttccattttttccattttgtatgtaagttggattatgatacttttatgtctacattgtctcttagtcaaaaatgtgagagacgccattcaagtctagacttggaccctactgaatgccttgttcatggacaccacacaatctcgatgtaaatgtttattgctgatctgtacaaaaaggggaaaagtagttttttgaacaacagaaaataccagttaatctcactggattcaggaattatagcaaagcaatccaataagtggattctctgagagtaggaactcaagtgtgttatctcagtttttatccagtttccagcacaatgctggcaccatttaaattctcagtcaatgctggagaattgaaaaagaatcctcaaaatttggatgacaaaatgacaaaggtgtcccctgatacagaaatctgtccatggcagaaagattagtgatttgagatatggtgtcatcattgtagatgatggtgtcccattaagcatgttttcactaattacaataaatgttgaaagaaggagtttcacctagtatccttactaatatcagggaatggcctgggctttggggagatgagagtcctctgctttcagtttaataaagtaggatatttgtgtttttgtttatattgttaaatacgacgggttagcttgtcacctacataatattgtgtggcataaataaaggtgaattcccaaatatgtgctccatagtgttgacaatgagtaaatgttcattctaataattgtaagggttacctccctcgcactccttgaaaatatctttttattcaaatttttcgagctggaggtcatgtgttacatttcctgttgtgtaacatggcctccctctctttctctgtctcactttctcactttctccctctttcttttactctctctgcctctacctctgactccttctccttcttcccagctttgcatcagagccatgtaactgacattttcttggttccctcaggacctgtcataatagcaggcaaatattagatgatgattcaatgtttaatgaatttttcttgaatgtatgtatgttgcttcaagtcattcatgcacacattgaagaggacagacagagccctgctgaacaccactagcaaatctctctctagtagaccacaacaagtcaatctgtgctctttgattacagttgttcaaccagttactaatctaactaattgtaactggttgaacaactgaacccaaagggtgcaaagtagaaacatttcattgtgaagtcggctggggacaaagaaaacaccaccagaacccccttcaatatgcaaagggaaaattccttctcaagtacaagctacatggtgcctttttgaattatcatcaatttgtaatgctgtatcaatacatatgtattatctgttcttttggtaagggttgtttgaagtataaggtacttcctccattaaggtgatactaaccacatgttaattattgtctgaaagtcaccaaggatatgaataataaaaagttttaaaaataagacctgtttcttttattgatagttgtacctcaaggctgaagtgaggtttgcaatgtaagttgtaaaatgtgatgtgaaatagacaattctttgtagtttatataaggcaatatatccatgtgcaattatggtcaaaaacagcagacttttaagtgattattctaaagttatttttttccaaaataactttattactcttgatatcataccatattcacaaaacattctggtaaagctattgctcagtgtgttgtcccagtgagactcagggaacatttctatgtgacgctttaggattgaagacagttccacgttttctgagtaattccaaactgtgtaagagattatgttccctttgcatattggctgctaagaagctcactttttcacttatgatacttggatgcattttggctttttgggtttttgttttttggtctaattttttttttttttttttttttttttgagacagggtctcactctgttgcccaggctggagtgcagtggcaccatcatggctcactgcaaccttgacctctcctggctcaggtgatcctcccacctcagcctctcaagtagctggaattacaggcatgtgccacaacacccagctaatttttgtattttttgtagagatgaggtttcgccatgttgcccaggctggtcacaaattcctggactcaagccatcttcctgccttggcctcccaaagtgcgggcattacaggtattagaggtaggagctactgcatctggccatgggaaacattttgaatgataactttgtttgtttgttgtctgttgagcaggctggagtgcagttgcatgatcacggctcactgaactctttcctttaatttttttattctctcagcacgattataatttattttaaaagtagggaataattggccaggcgcagtggctcacacctgtaatcccagcactttgggaggcygaggcaggcagatcacaaggtcaggagatcgagaccatcctggctaatatggtgtgaaaccccgtctctactaaaaaatacaaaaaattagccgggtgtggtggtgggcacctgtagtcccagctgcttgagaggctgaggcaggagaatgacgtgaacctgggagggggagcttgcagtgagcccagattgtgccattgcactccagcctgggcgacagagtgagacttcatctcaaaaaaagaaaagcagggaataattagtaagtgcctaactaatcaaaaattgtttccaggtgatgttgctgttgatgtatgaaaacctctttcacctagcttccctcttcattcttttctgtcatatttctattgaccagtgctttcttggcccttggaaatgtgattaacttttgccatgacctctatgttagtgccacacctgacacctttatgccactctctgcctccagaactctgtgtccatcttatatgtttttaccttctgctgggcctcaggtctggatgcaaagctgtagaggaattgagctgtttttcacaagggatccaagaacacatagcatgtgtgaactgtactaaagctttgagaagttgtgaagaagattcacatcaactatgcaccacacagccttcttgtcttgctggtaccatctcctcacctctgtgttgctcctcttggagtcttcaccttccacaaccagcacttctattctcactgtctgagtgtgactttccataattgtgaaactccttgggcttatccctcacactcattcttgaattctaaggaatggcattttctccattgtgcttacatttgcttttcagtattaattgttctagagaaaagcattcattcactcactcactcattcactcatttaacaaaacctgtatgggtatctacagtactatgttctaggtatactgaagacactaacataaataatacaaataataaccttttctcagggaatttagattaaagtagttcaaattggagcaggggaagcaaatatttacgtagattatcagggaaaatgtgtagtgagtgccgtgattagcactatgcagaagattttatgggagtggcaaaaagcagaacctaaccttttctggggtgaaaagtgtgacctaaactgagtcttaaagaatgaatgtagggtggagagaggaatrggaagagcatttcagggagagaggaatagcaggaacagagacactgatgcaaggaatcccatggtatttgtgatgaagggatgatttagtagttcagtgacaagacatgagcctggagataaataaggtttaggttctggggaccttgtgagccaggttaaggactttgggttcatcctcaaaccatgaagcattccaagcaattatgtgacaagatcagattctaggggctgaatggagaataaatatgtaagtggcaagattgaaggctgggaatgtaaaaggtggctcctgctgtggcttgggcaaaacatcacataggcttgagctagctttgtgattctacgggattgagaggagaatgctaatttcataaatgtttagtggatatgattggcatgtgawctgaatgcaactggagaaggggaccagtcatttactgagtwgatattggtaattgataaataagaccaaagaaggtgaggtttggggataggcagtgtaaattttggaagtaataaggggattgaggttctgtccatggcattggtggggaaatctagcatgtaaatacatgtaaatagataagtaaatatgcctatacatttatataagatatctatacacttattctccttctttgttcatttattaggtgtgaaatctacgtgatttttttctcccatattatttttggtattcaataaatgtgaatcatgaagagatagctgttttatttaatctctgcaaagtcacattcttacccattttgattgtaataaaaggcctatgtcgttatttaattttttaacctttgtggcatgatttatagaaggaaaataaaagtgtcataggtatgataggccaaagttgggttgttggtaaaataataataccacaaaatgtttttctatttagccaactactgcaaagttactttaattgtgtttgcaattaattgatttcactttaaaccagaaacaatagagactgtaatcacacagccctgcagttctgaatgttttgttcttccttttattggttttctagatattcctagttggcaacaggatagagttcagtaatggttatgcaatttcattgtgcagggtattaaaatttgtgaccagggatcccaggagaccagctattagattttcaatgcactattagattaaatmtatctactcaaactaaagggatcctgcctgaggctgtctgatcaatagtctatcattcctgtgcaaatgaagctattaagattctcttaggaggtagactatctaaattggatctaactagtagatggtgactgaaatgagggatatactgatacttaattggcatcaatctgaccttgataagattttgaaaaaataaatacctttttgctacaggttgaaaaagaggtgtaaaatagtccctattttatattattggttcttaagtacttatcagaaaaatgacaaaagtcagtgtccataaacaaaggttccattgatctttgatcaccaaatcatcatttctatcttcctcttttttgtttaggtcactgcagtcaccattacctccaccaccatcataattatatatagctaccacttcttggacactcaggtctgcttgtgtttgaaccagacatttctagctccaaagcctgcattcttaatttcctgcagtcttaataccatctttttaatagaagacccccacaggaaaagctgattctataatttaaaaatgatttggggatccaataagtcatgattctattttatataattttggaagatgtggccagagagctaactctttttattttattatttttcttttaattgttgacgtacttataaccaccagctatgaagctataatttattgccacattgagtatgttaaattgttaatttacataatttctgattcttatttctcccctctcaaattcaatttgataatttaacatacctgcttctgtgtgttccatggaactattaatataattttttaacagaattatgagagaattacatttccccagctgtagatcaattgagaaacagtagaaatgaaaaggttaagaaattctgcttcaaaatctcaaatggtcaaagtcattgacattgtaagctcttctgttcgactcaagcctggtggaaaatgtaatgaagaggtacaaagtacactgcataatccagcaagctaattgcccactttaaggcctcttgagcccaatggccaagtgaaacctccactctcagggaaattaggcaactgctaaggtggttttgcagttttcagagacacagagattaggtttttcagccttatatagatctgtgatcactaatgatagtctgtgctaatgaaggtagttttttgaatcaaatgcatattgacttaggtcttcagcgcagaatgttgattcactgctgtcatccctgtcaagagagctgcatatgtaattatggttttcttytgaatagatttgctttgggactgtcacgcaaattccatttcttcatgttcttgctatctttcaacctcaaataaataaataaatagaaaaaatatctctaagcactatgtgtgggctgtcattctttttacatttagtgttctaatgtttttaaacaagtcagtttacaggtaaagtttgctgtaataggattgaatgtgggtgtatgtggtggtgcttcagatctctttccttctgcttgacccttcatgttgggtaatagttttaaagcgctcatgccagaaagtaaaccacaacatagtcaacttctcaaatatccatgcaatgtagaaagtccggggtcaagatgattactatgtgatctgcttaagtgggaacagggccatttccctcgccttcaacacactcagatacatctcagccaaccaacattttgctgtttgaaaaacatggcagactttatcttgtccctaaagagaatgcttttctccatccctctgcttaatatcctgtggctccatttaacctccaagccaaagtccagtttcttttagaagacttcaggcaaaattaggagcctcttatagtgggatgaatgctttctatactgtttttgtaatatttttgtaacatttgccatattaaactccatttattttatgggtctgaatcttcactagactaaactgcttgagagaggagcatgtataattcattttcatgttcacaatgctgaaactgatgtctatagagcttcagtatttgtccactgcataaaatcagtaaataaaggcaggaaagtttgttacatcaagtaggaccaagggctagatccattgggacaattcaacagggcttttcattggttattctagctgatatcaacctgccctgacctgaatcaactctgagcccctacctaggctgttgtttcttagcaagtacataataacaactcatcagaatagcagagatcttggtaacaggttgcctgacacttgactgatatgggaaaatcctgaacaggtttggactggaatcttggctcacaacctgtgtgaccttggtcaagatattttatctctctgagcctcaattttctcttctgttaaatgagcatagtgaaactttgttcattggtttgctttgaagagtaaatgagatggtaagtgttggtgtatgtagtgcaggaacataacaattcttgatagatattcattgaatacctrtagtacatagaacatagaaagttcctgttattccactcccacccccacacacttgcccttcaggtctcaggttctccttcctggtacccccagaaagattaagcccctttggccctctatgtgcctcttttatagcatttaacacaattataattaattgattatgtaacttttttatttaatagctgtctcttgtagaatataagcacataaattcagggactatctattaatgaattttcctctagtgcctagtacttaggtggctcacagtaaatgctgattcaatggatgaataactttattcagtctgctcagtgtggcctttaatttagattcaccccaaattactccccatcaggaaggctttcttattcaactttctcatcctcaagattagcaaaactactctctttctattcccaaatatcttctctcagtttcattaccatgatcagaaagtactcttccttgaatttattttctagactagatctattttggggttttcttaccagtgattgtaactattgatgtggtcttttttctgttttttacttctcatatgtgtatctctttccattagtccttcattccttcaacagatactttctgttgtgacagccactcttctaagcactatggaaggatttaaagctgtgtgaagcacagttattccggtcaaggaacttaaaaaaataatacaagtgacaaaacatgtgcaagtttgactaaagtatgagactggaataaataccttataaaaaccaagagcttcagtattttcctgcagttttttgctctattgtattctcaacttttactggtttctcatcaaataaatgtgttaaagtataactcagatcattgcttagatgtacttacttttccaacaaggccttccctgaacatcctatttaccattgcaaatgcattcctctccactagcgccattcttaccctctctttccacatcaatgaatttcatagcacttgtcactttttttcatgctgtataatgtatattaagatattgcttattgtctgtctcccttcaatagaatgtaagctccatgtgggccaggatgtgtagtcattgatgtatccctagaataagtgcccaattatagtagtcatttgatggacatttattaaatgaaattatgaatgaagtagggattggcagttatacactaagactctggaaaaatggcctgagttgaatcctggctttaccattcttggctatataatctcatattatttactttcagcctttcatttcccagatgcccctaccttctagggttgttgggaggatggaatgcataatacatgtaaaccagcaagttcatagtaacaaaagttgactttttaaaaagttaacttactcttctttcctatatatgtgtaaatcatattttattttctcattttaaaaagaagacaataactaaaggtattagcacataatgattcaaaacataatatttccacatgtcgagttgaatgactttgagccagataatatgagttgaaatcagtttaacaataattaaatcagccaagagcagtgtctcatgcctgtaatctcagcactttgggaggctgaggcaggtggatcacttgagctcaggagtttgagaccagcctgagcaacgtggtgaaaccccatctctacaaaaaatacaacaacaaaaaattagccaggtgtggtggctcatgtctgtagtcccagctacttggggggctgaggcaggaggatcacttgagcccaggaggtcaaggctgcagcgaactgtgtttgtaccactgcacttcagcctggacgacacagaccatgtctcaaaaagaaaaaaaatagaataaaatcaaatacacaccatttttgaatatgtcaccagtctgtgtagttcatcttgaaaggacttcaaggtccaatatgcatcatgcagagagttgctagggcccagacaagagtgacttgaccattggcctgagtagttaaactatcagataactagtgaaacaattcggctatttcaacaaacatgttgcatacataacgtgttatgcacagagatgacatttggtataatattatggcaataaaaggtgcagttcctgccttggggaagcaattgtaatatactgtgaggagctaagagtaaagaaggggcccttgtaaatgaggggtgggtcagtagggtagcagttggcagaagactcacactggaataaatgctccttgactcgatattttttttttttcaaaaatgcagaagcattattgaagcccggatgtttgggttctatgataaataaaagatatggatttgagctgctcattaaattttgaaagaaaagatcctaaaaggttagagaccatggagatttcaaagtggctgaccttgattagatataagtgtaagtcagatgggtattcctggggggtcccgactttaatacaatttgaaagtttcatgattatgagcacctctctgtgcctccttggtggagagctgacctatgagtagttactgtgtgaattaatgaacatccttcagcaaaagttattaatagtaatgtttggtaaaagtcctttagaagtagactgttatgtgtgttactagttataatcaattaataacctgtgatttgtaggagcaaatggtcatagggatacagtatacattttaatcttgctcttcaaacatcaccgtagatccatggtccttctcaagacattggctttgttctgaagcagctcccacgctcttccagaaatctctatgcgggactctgaatgtggtcaagaagaagatgtactggatgcacattccctatcaggagtctcttaatagtctcccacccagttacaacatattgctgtaatcccacacaacagctgaaacatcttttcttcatttcttttaattcctgtagcatttgatgtctccaccgtgtaatttacatttaattgtaagttgttttgcatcatttaatagttgtttcaagtatgaatgtcttgccttcccaagaagattaaaataagattcctttaagaacagaggctcactgcgcagtgccagacatagacatagagtaaaccacaactactgacttcacttcaagctgacctaaccatcttcccagcgaagacggccaacctggtgtataactcattcttctgatctgcacttactttatagaggaataaatacactgagttattgggagtttgtgaaggaagtgactagaatttcaataaaataataaagttttgttttgtttcatttcgtttgaaaagaaactgctgcatggccaagatatttgaaaatggaggctgggattggacaggggtgaagaattgtgtcacagactttgtactggaaaaatgtctgccttaatctagtgaataaatatgactgttctttgaagtcctttttttcctccccgagtataaattcaaatgctattcattttctgagttgcctgtatttctttagcccttaaggcatcaacctttgatgtcttattttcataatattttctctcttagaactgatccacatattcagtagaatggaggtataaatcctaatccatagactactccgagcttattgaaagtgaatcttatttagattctttcctttatctgctcactgacagatctaatgttaaacagaaccttattatcatcacaaggaagtagattaaaaaatacttttcagtcattcgtattcaacaagtacactccatcaaatcttgcctaactttttttgcaaataactttgctccttggatcctctcccaggtctttatcaaaatggaaccacatacatttgtaactacctcataattaaagttttgagtcattaagttcarttatctttaagggtaaacattgaatttgctgtaaaagttccatttgtttcactaaaattygcaaatagttgtgattttctttgcagatctgtccagtttgatcttgaaacaaaactgcttaaaactttatcagccttccttctttttggcttagctttaataaccacttttaatatataactcagatctataaataatactgagaaaagcagtggaaaacattgcaggtataaagacttttcatgttgactatttttggtaaagattctggacatttgagtgaagtctctcatgttttattggtttattttactctggcaccgcttatgaaaaaggggacttgaattactagagggtaattttctttctttattttatttatatattttttactatttttttccttcagttatgttgtttattcaaaacttgaaaacatatacaatttcagggtcttctagagtatatttacatcattctgatgaacaactttataatttttaaattagcaaatattctcaaccctgtcagctttaatattataattaatgtgcacaaakctgaaaacttttcttgctcatactataatacattaaatagaccttagcaaacaacttcttatttgaatacttgtctgtccctgtcactcttctcatactttagcctcataactttggttataattatgtaaatggttaatattcatgttctcattgcaaaatgaaaagtgaggaagagaaattaagccatttgcctaaggtcacaagtctggtaaaatcaacagaggcactcagaatacctccaaaatcatttccatgatgccagaacctttaaatgctacagaaacaagctaaagcgatgcatttaaatgtgcttctatgtagggcttgagctgtatctaaacttaaattagagctcagccaacatagaatctagttcagcaatactctacaacatgagataaccatactgatgtttgatataaaatgagattgcagaggaaacacattttaatacctgaggtgtgtgcttaatcttcttgatgtatattaaaagctcagtacgtgagagtaatatgaggtgatggggtttactcttaaagagattactaataatgtttatttggaaaaagatgaagattttagaggctatttaagaaactggttctgggaaaaccagccataacttaagagttcttctttcacccaatccccttggaattctgctttgctatagaaccatggtcaaaccaaggcaagcagcacaaattacatgaacaaagaatacaacaataaaaagcggatccttaagaccctcccaagaagaccaagagctctctctttaaaactctgtaaaatacctaggttctcaagtcttcctatgtcttatttcttaactaattgcactatcaattcaaaaatggaacaaaggatattctacgtatcagaaccttttttcctatacattaagaagaacttttcccacatgaataggtaatatcacagtctaaagccagaggatgaaacctatgaattcttcctatcatatattttaacaagaaacgtaaatatctatgacctacttatagccaatttatattttgcccaggttgttttgtttctaaacttacccctcatatggcttaataatgaaggccataaatgtgcctctttcctatctcacccctatgacttgacatgtattataaaatgaacttcctatataaaataatatttattgaatgaaaggaaagtattacatacaactttcattattatattattaagcttattttttgcacatcatrgctagatcatcttaaaatagtttggctctgtctcttttcccattttttttttttattatactttaagttctagggtacgtgagcacaacgtgaaggttcgttacatatgtatacatgtgccatgttggtgtgctgcacccgttaacttgtcatttacattacgtatatctactaatgctatccctcccccctccccccactccatgacagaccccggtgtgtggtgttccccaccctgtgtccaagtgttctcattgttcaattcccacctatgattgagaacatgcagtgtttggttttctgtccttgcaatagtttgctcagaatgatggtttccagcttcatccatgtccctacaaaggacatgaactcatcattttttatggctgcatagtattccatggtgtatatgtgccacattttcttaatccagtctatcattgatggacatttgggttggttccaagtctttgctattgtgaatagtgctgcaataaacatacatgtgcatgtgtcttatagcagcatgatttataatcctttgggtatatacccagtaatgggatggctgggtcaaatagtatttctagttcaagatccttgaggaatcrccacactgtcttccacaatggttgaactagtttacagtcccaccaacagtgtaaaactgttcctatttctccacatcctctctagcacctgttgtttccttactttttaatgattgccattttaactggtgtgagatgatatctcattgtggttttgatttgcatttctctgatggccaagtgatgatgagcattttttcatgtgtctgttggctgcataaatgtcttcttttgagaagtgtctgttcatatcctttgcccactttttgatgtggttgtttgattttttcttgtaaatttgtttaagttatttgtagattctgtgtattagctctttctcagatgggtagattataaaaattttctcccattctgtaggttgcctgttcactccaatggtagtttcttctgctgtgcagaagctctttagtttaattagatctcatttgtcaattttggcttttgttgccattgcttttggtgttttagtcatgaagtccttgcctgtgcctatgtcctgaatggtattgcctaggttttcttgtagggtttttatggttttaggtctaacatttaagtttttaatccatcttgaattaatttttgtataaggtgtacggaagagatccagtttcagctttctacatgtggctagccagtatttccagcacaatttattaaatagggaatcctttccccatttcttrttgttgtcaggtttgtcaaagatcagatggttgaagatgtgtagtattatttctgagggctctattctgttccattagtctatatctctgttttggtaccagtaccatgctgttttggttactgtagccttgtagtatagtttgaagtcaggcagcgtgatgcctccagctttgttcttttggcttaggattgtcttggcaatgcgggctcttttttggttccacataaactttaaagtagtttttttccaattctgtgaagaaagtcattggtagcttgatggggatggcactgaatctataaattaccttgggcagtgtggccattttcatgatattgattcttcctatctatgagcatggaatgttcttccatttgtttgtgtcctcttttatttcrttgagcagtggtttgtaattctccttgaagaggtccttcacatcccttgtaagttggattcctaggtgttttattctctttgaagcaattgtgaattggagttcacttckgatttggctgtttgtctgttattggtgtataggaatgcttgtgatttttgcacattgattttgtatcctgagactttgctgaagttgcttatcagattaaggagattttgggctgagacgatggggttttctaaatatacaatcatgtcatctgcaaacagggagaatttgacttcctcttttcctaattgaataccctttatttctttctcctgcctgattgccctggccagaacttccaatactatgttgaataggagtggtgagaaagggcatccctgtcttgtgccaggtttcaaagggaatgcttctagcttttgcccattcagtatgatattggctgtgggtttgtcataaatagctcttattattttgagatacatcccatcaatrcctagtttattgagagtttttagcatgaagggttgttgaattttgtcaaasgccttttctgcatctattgagagaatcatgtggcttttgtctttggttctgtttatatgctggattacatttattgatttgcatatgttgaaccagccttgcatcccagggatgaagcccacttgatcatggtggataagctttttgatgtgctgctggcttcggtttgccagtattttattaaggatatttgcatcaatgttcatcagggatattggtctaaaattctctttttttgttgtgtctctgccaggctttggtatcaggataatgctggccttataaaatgagttagggaggattccctctttttctatcgattggaatagtttcagaaggaatgttaccagctcctttttgtatctctggtagaattcggctgtgaatccctctggtcctggactttttttggttggtaggctattaattattgcctcaatttcagagcctgttattggtctattgagggattcaacttcttcctggtttagtcttgggagggtgtatgtgtccaggaattcatccatttcttctagattttctagtttatttgcatagaggtgtttatagtattctctgatagtagtttgtatttctgtgggatcagtggtgatatcacctttatcattttttattgcgtctatttgattcttctccctttcttctttattagtcttgctagtggtccgtcaattttgttgatcttttcaaaataccagctcctggattcattgattttttgaagggtttttttgtgtctctatctccttcagttctgctctgatcttagttwtttcttgccttctgttagcttttgaatgcgtttgctcttgcttctctagttcttttaattgtgctgttagggtgtcaattttagatctttcctgctttctcttgtgggaatttagtgctataaatttccctctacacactgctttaaatatgtcccagagattctggtatgttgtgtctttgttctcattggtttcaaagaacatctttatttctgccttcatttcgttatgtacccagtagtcattcaggagcaggttgttcagtttccatgtagttgagcggttttgagtgagtttcttaatcctgaattctagtttgattgcactgtggtctgagagacagactgttgtaatttctgttctttaacatttgctgaggagtgctttacttccaactatatggtcaattttggaataagtgcaatgtgatgttgagaagaatgtatattctgttgatttgtggtggagagttctgtagatgtctattaggtccacttggtgcagagctgagttcaattcctggataaccttgttaactttctgtctcgttgatctatccgatgttgacagtggggtgttacagtctctctttattattgtgtgggagtctaagtctctttgtaagtctctaagggcttgctttatgaatctgggtgctcctgtattgggtgcatatatatttagratagttagctcttcttgttgaattgatccctttaccattacgtaatggccttctttgtctcttttgatctttgttggtttaaagtctgttttatcagagactaggattgcaaccccaccttttttttgttttccatgtgcttggtagatcttccttcctccctttattttgagcctgtgtgtgtctctgcacgtgagatgggtctcctgaatacagcacagtggtgggtcttgactctttatccaatttgccagttagcatcttttaattggagcatttagcccatttacatttaaggttaatattgttatgtgtgaatttgatcctgtcattatgatgttagctggttattttgctcattagttgatgcagtctcttcctagcatcgatggtctttacaatttggcatgtttttgcagtggttggtactggttgttcctttccatgtttagcacttccttcaggagctcttctaggcctggtggtgacaaaatctctcagcatttgcttgtctgtaaaggattttatttctccttcacttatgaaacttagtttggctggatatgaaattctgggttgaaaattctttaagaatgttgaatattggcccccactctcttctggtttgtagagtttctgccgagggatcagctgttagtctgatgggcttccctttgtgggtaaccygacctttctctctggctgcccttaacattttttccttcatttcaactttagtgaatctgaaaattatgtgtcttggagttgctcttctcgaggagtatctttgtggcattctactagagggtaattttcttttagggtgttataattattttaaaaattgattcattggaatatgttatcaatgtcaaaacatgagataacttgatgattatctctttatgaatttgaggtgctgagtatttcttgtttttcaattacagcattctttcaaatagccagtctcatgtttctatttctctcttagctgcttctttctttaatattttgttgctaatgagaacctctaccaaaatgagtaaccaaagggctgaagaaagttgaactgttaaatggtgtttgttaattgcttcttcaattacagaaggattttatatgttgagtaacatgccatttgaagatttgacaattccatcctctccttggtaactccccagtcatttggtctagattgatccatcatctttctcacttaagagcatttagttctcaccttcaaataatcagcagattaaaatagtggtacatagtcatctgtaggaagaaagaaataagctgtacagtagagtgctctgtgggtaaatatttgttgtgttgagatataacctgtgtatatttattaaatatcagtgacatttctttgcttattctttcattcactcaacagatattattgaacagctgctgtgtactaggcattgttcattttcccaaattctaaaattgtgatcatttctatttttaaaatgtattatttaacaaagtactggtaatgatatatatctttatttcccagtgggttttggcaatatagcataaagatcatgaaagtgggctctagaatctgagagcctgtgaaaacttcagctccaacactttctagttgtgtgagcgactttaggcaagttaatgaacttccctaagctcatttacttcatctttacaataggtataataatagtacttacctcatgtccactatctaaagagtaaatgggaaaatatgcaaagcatattgcactgggcttggcaggcaagtaatccctcaatagatgttaaatttgctgctgttattaaatcatagttcttgcttagttgattgttataatctttttcagtatttattgaacaaatacctatgaagtgtactcagagtaaacttggacagtgagagacaccaccatctggcctgttgtgtcataaacaaaagccttaaaactgggtcttggcaatggtgaggggaacagatgctctaactgccttctagaatgtgtttttcactatgtgtctaagctgcgatgaatgtcactaatgtcatctctctttctattttaggtaagtacatcaccatttttgaaactctgtgcagatgggtaagtcttgctgctggaacttttcctgttgatttgcatacttggaggatctggatcagacagtgtgcttatcgtggtcagaaaatgcctttattttattcaagcagagatctggaaaggtaacagaatttcccacacatgctttccatctctgtttcaaatctttggcagaaaaaaaaaatctgttatttttaattagataaaatgctatgttaaataattgaagatttaatttcttactctgtcaatagaaggcagagtagtttaaaagacttgagaaaagaaaaacaattgtttrcttcctattagaaatcacaaaatcctctctgaagtaaacatacaaatctttgtttttctgctttcaaacagggaaaattttttcagtgcctaacaaacaggtgtttcatgattagattattaatgagaaataattttgtatcaaatagaaaaagtgacaaatggccctgcaagaccwtgtgtgcataatattgtagaaggaattcctgttatgactaagagttgatgtagttaatttagtatgtctaaagttggctgtaatctatcaccacagaagagctggaagaaatgatcttaaatcacaaaggatttagtaaagacctacgtgagctgtgaaagatgattaaactatgaaatagttctcaaaaggaagttataaattccttgccacttgtgaaatctaaaaactacatagacagttatgttcrtattagaaaataaagatttatcctgccttggcacaatgtattgaattggcatgttgttctcagtaacaaagtcccaatttgcttcatcagctttaattccctatttactccatacatactctatactctatgtgttagtctgagtcttgcaagaagcccatgccaaaatgggattagaaatgcaagaattttaggaaatgcccttgtagaggaatataaggagggagccagttaaggctgagggaaacgtcaaagcatgatccaagtttgactctgagtaaagaagggagagagaattggtgagagcatccttgattgggctagccaaaggcatatgggagtcctcaagccaaaatcagccatcagaggaatcctgtttcccaggaatgtgtctgccacaacatgccctctgtgctcagtaaataccaggaagcagggcatgggaggtatggccttagctaaaatgttgcagtgaatttcagaggcatcagttggggccctttgctggttatagttcctatagttggaggtctgcagcatatcctcacggccccacacagagactgttagatcttggttctttctgtttcttattttctattacaatgccttctatctccacatcttactcattcttcatgcccaaatcagttaccacttccttcatgaaggttactctgtacaacctagtggctaataattaccattctcttttgtaattcaaaaattcttgtatttttctgtgatatttattgttttttgttatccatttattcaaaaaaatggtatcgagagctgcatttgtgctagccacttttctatgctctgtgggggagaggatcagaaaaaaatgataaaacatgacagtctaatggaaaagataatactgtagaatacattaaaatatgacagaaatgtttgaagtatgagcaaaagatatgaggagacagaagaaggaagaataaccttttgggaaagaagggagggcagtgctcagggagggatggaggatttaaagcaggacttgacattgagttttgtcttggagggtgactagctcgttaggagttgacagttgaataggcatcattttcaagttcatggttatatgaaggagcatagaaaaggtttgtagtacagagagccttgcatgtcatagggaatttatgggattacggtcaaagagaaatctgcaaaattggcctaaagccagattatatggggcatcgggtcttggcaagtagtttggactttattctatgagcccaatccaattcagaacatctcagagtcatgtgggccaggctgaatgacaaaaatattgatgtatataattctgttatggcatactaaaatggtatgattctaccaaacaaaaaagatggtgatactatatatttaaatatgttgtctatatctaaaaactactaataaattacaatgaagaaatcacattttgataaaagaagataaaaatatagggcataaggccaaaatgtaatggaacgatttagcagactcttaatctcaggtgtgagatttgtcacgaatagctattttctgctcgatatatatttactttctgtacagtgtggttataaagacataactgaaaaatctagttgtcctcgaaatatgtaaggtatcaaaaagcaggattttatgctgagtgtgctttataatatttggaaaatagttataactagttgaagcattcaccagaatgtcacttgacaattctaactttaaatatctataagccataaagttaatatattatattgattttgatttttaatttgatgtaatttcagatttactgtaaagtggcaagaatagcacaaggaattcccagatacccctcaccaatatcccccaaatgttaacattttactacatttactttattcaatctctgtctctcatatctacctttctgtctatctaatcatctatgtatccgtctacccatacacacgtttccttattgatacacattaagagcaagttgcagacatgatactcctttgcttctaaatacttaaataattcctaaaaacatggaattatcatacataggtacagttcagtggttaaaattagcaaattaacatggataaaatgttgttatctaatctacagactttattctaaatttcaataattgtcccaataatgttctgtgtagccaatgaaattacaaaatcatgcttttcaatcagttgtcatgtctctttaatatcctttaaactggagcagtttctgagtcttcgtgaaagactatttcatgacatttatatttttggagaattacatgccaattgttttgtacactctcttgatttatttgggctgctataacaaactaccatagtcttcatggtttataaacaacagaaatttatttctcatggttctggaggctgagaaatcccatgatctgtgctaagcagattttctgtctggtgaggatcagctttctagctcataaatagctgtctccttgctgtgtttttacatggcagaaaggaagagagagttctctggggtctcttttataagggcattaatcccattcatgagggctctgtccccataatctcatcacttccaaaaggccacacctgtaaataccatcatattgctgattaagtttcaacatatgaatttggaggcaacgtaaacattcagtctaaagcatagactatctttcaatttgagtttattttgtgtttcctggggatgatagtcaggtcatacaacttgggcaggaatatcacagtagggatgctaagtccttatatccagaggtagatgctgttgtttagtaccattactgacaattttagctttgatcatttagttcaagtggtgcctaccagatttctccactgtaaagttactattttcctcctttgtaattaaaaagcattttgtaccatgataatatgagagcatgtaaatatgctgttattcctcaatttcttacccaatagctttggaatccgttggtgattcctgtctaaatcagttacttgtgttattatgatggttgctgttttcattggtttaatgctgccgtaacagataccacaaactgggtaatttataatgaatagaatttatttggctcatggttctggaggctgagaagttcaggatcaaggggctgcatctggtgcagtcctttttcctgctgcatcatgacatgatgaaaggtatcacatgggcaagaaatagggagaagggggccaaactcatttttttttttttttttttttgagacagagtctcgctctgtcacccaggctggagtgcagtgactccgcctcggctcactgcaacctccacctcccgggttcgccattctcctgcctcagtttcccgagtagctgggactacaggcacccaccaccacgcccggctaattttttgtattttgtttagtagagacggggtttcaccgtgttagccaggacggtctccatctgctgacctcgtgagccacccaccttagcctcccaaagtgctgggattacaggccttagccaccgcacctggcccaaactcattcttttataaggaacctactcctatgataacagataaagtaatccattcatgaagggaatgctctcatgatctaatcatctcttaaatgtcccaactcttaacactgttgcgttttggtctaagcttccaagatgtgaactttgggagacatattcaaaccatagtggtttgctaaggggaaatcttgtaatttcatcatttcttcctcttttattagttggctttctattatgcataaaaatgtttcttcgtgcttgtttctgtgtggagtcatgaattctttatttagcaggttgttatcctttaatattgttggttaatatcattatttatcttaatcctcatactgtcctggatttggacagtacaaggtacttctagttgactcccttgtcattttaacacgttactatcattctttgagtacttttttactttttggttttagatatgagactcttgttcttttatccaagccttggaatcagctacttttatagggctctctgtttcctttcagtaaagaatggtttttagaaatcaaaatttggagagtaggtgtgcttttgcttctaggtccttttagtagacatatctagggggaaagtgtatgtatgtacatactcatatataaatgtgtgcatatatatgcatacccacacatacctatatccatgggtatattcagatatttgtatacattaaacctaggatttcacaatgataatccatcattgcagtgctcattctgttcttctccattttcgtatctgtaactctgtgagaagttacggtgagaagcctggctcccattattcacaatatattatatattgcataggattttcttacctgtggaatgtggtttcaaaaattactttcagaattacccactcacgcctctatggaaaaagagaagtaaggcaaagaaaagtatttcagtaagtagacttttagcattatttatgttttatatgcctaattctgtactcaaaattcacttggttagttcttttctcacagccacttccactcacttcacggttctgttacttattttaaatatggatcagttaatttgttttaatatataaatttgttttcatctagagttgaatcgattaatctggaatgatattttctgtttctatgtttaaaatatcaactaataatttcctttccttaataataagaaatctctagcaccatttaagactcagttaactgaggtgtaggtatccatgttttcctagagtatagagctgtgatctaaatcagaaaatctgaacaagtttgtcttggaccaaacttcaggataatctggaaacaacgggacaaatgttagtgcatgagtattttcaaacatagttctgagtaaattccaaatgcatatgtgggtttgtggctcttcatatctggttatttgtacatgatcacatctttattgtagataataaaagttgggtataaaagcaatgccattaattatgtattttttatgctttttgtttcaaaaaaggaattaagcaatcctaactttaaaaatggataaaatgcctatgtaaagctaagttagaaacacaaatgtaaaagtgtatttcgtacttggagttaagtttaggtcttaaaatattaatagcttcctcaaagatacagcaaatagagaaacctgataatatttatgtcttgagagaaaattatctttctataattaattataagacttttcattagggtctttgtgtaaagtaaagcaataatatgtttaatagtatttttatgtgagttacatacatgtacattattaatcatgaataaatagtgatgttcttatacttagtcttgttataagtcaaaatattaaatcattattccatgaaagtcttcatatagtaatttaaatcattgttaagtctggttacttgatgttgagaaagagcttagtacacatagtagaatgacttgccagccttgccattaggttatctttctcatacattacttaccttaagttggcaggagcttgattacagaagataactgtcatttatctctttgtgtggagtgcatatattgtgggatgtctataggagtattacccaaagggtttgtattacagaattatagttaacaaaatcactaggaaatgtttatggagggaagataaccacagatatatctgattacctatttggaggactagcagtggaatttcttgctgtttctcatgtggccaaaactaataaaataaaataaatttagaagagttttgttgtaccaagataatccatatatttcagttggtatggaaaaacatcttttctttcagccattgttactatgacacttagacactctagtctacaaaattatcctaggtttagcaatattggaattaaattttattgttccttcctgattgcagagttataaaaataaggattgagttattatgagaggccgattgtgtaatacatatcatgagttaaaagtaaacgttgacttttattataattgccttttgccacatgagagaaaataaactaagtgaataagactgtctctaagtcttctctgagattaatttgacaatttactagaaatagaaagattggtaatgctcagtctaggaaaggggtaaagaaacaggcacacatatattacttgagagattgtaaattttgtacagttacaatggtaacactccatgtcaaaatatgcatataacaatgcctcttgtagacatttatcctcaagtaacaagaagtaggcaaagattattttatgtattttgaccgtcaatgagttgataatagtaaaggactagggagggttggtgtttaaaacaggccaggtgcggtggctcacacctgtaatcccagcactttgggaggccaaggcggatcacttgaggtcagaaatttaagaccagcctgaccaacatggtgaaactccatctctactaaaaatacagaaatatccaggcactgtggcaggtgcctataatcccagctactcaggcgcctgaggcaggagaagtgcttgaaccccagaggtagaggttgcagtgagccgaaatggtgccactgcactccagcctgggtgacagagccagactacatctcaaaaacaaacaaaaaactaaaacagactaaattgtggtacttccatattttttttaatgatagagatattagcattgaaatttgtcacaaaactacacataatgtaattctttacacatttttaagtatatgggctaaagtatgaaaccaactctgagtaataggattataaatattctttatctccttgtatttatatttatttataccttaattaaattttgaaataatgttgttacttttacaataagaagttgtgaaaaactattaccatgaaaataatctagcaagaatttgatttaacattgctcatttcttgaaagcaagccaagacatttttttttactctttttgagactgagtttaaggtatttgatcaattgttagaggatgagtttatcattttagtgccttgctgatttgtgcaggcacctcagttttaagtaatcatgggattatttatttgttgatttagcatttgttcagtacttatgtgcttaatagcacttgaacatacaaagagaaatgagatttttggtccccaagaattaaaaatttaatggaggagataatcataaacttacagagaagtatatgataggctgtgtcaaagtgggaacaatgtagactagggaaatacaatgcttctcttggatgggtcacacctaggaggggccaaaggggacaactcactgggtattggaatgatctggatccctggattacttggttggtgctgggctgattcggaaaccctttctattttcaactcttctgctaaacatcattatagtaacatcagtacacatcctgctgttaccaagtgtcagtgtttggtcagtttgagttttacaggcatatagaactgccattttgtcatttctgtctacattgtacaaaaaagtaatttaactgagctttataacttatgatttggagaactccacagctcccgttgttctttctcaaaaaattattttcagtgcaacttagctttctgtgtatctccattgctcatctgccctagatggttcaggttggttgctgtctctattagtgtgacaagagttaataaaatgattaattaaaaagagccttaaacgtctacttagaaaacactagataaatgctaagtagggtgctttttggtggatcaagagagtccagatcactaatatatggatggcgtataaattaaatcactgtgtaagactgcaaaatgtcagagaaacattttaatatgttccccccagcatttgcctttctgtacatatgtcttagaattataatgcctacattttaactatggttttctgtgggtatatatacaaatagatagcaactgattaaaaaaaaagatctcaacttttttttttcaattcacaagattggagtatttggagatagggctgttttttctctttttttccttttaaagccatccacattttcttttctactgctttctcactcaaaaaatgtaagctagaaaaagttgatctcatggaagtaaaaaggagaacagagattactagaggctggaaacagtagggagaaggggaggatagagaaatatttgttaagaatacgaaatgacagctagataggaggaattaagtggtagtgttctatagcactatagtatgactatagttaacaacgatatattatatattttcaaatacttagaggatattgaatagtcccaaagaaatgaaaaatgttggaacatatgctaataccctgatctgatcactatgcattgtatgtattgaaacatccctacgtacaattattatgtatcaatttaaaaaatatctaaaaatatatgtgtacctaagtgtatacaccttatatatcctttgatttccttatgaaacacagcatagtttgagatttaaaatgaataaaatggttctttatgctctgtaaaattagaaaatccttcagcttttagaagctctctgttggtttattagttgatcacaaattaatatgtccctttggtttaatctgtatcataaaacaaaagttgactgttcccaaacatgtgcttggataagagaaagctgttaataaatatctattgactgaatgaaagtataaatgaataaatatttttagcccttagaaatatgtgaaaaatacctagaaaatattagacataccaaggtcaatgctaaatgtaaaatgtatttctaagaaaactctaagtatgcaaccatatggattgattaaaactagttacttaaaacctcttatgactgtatttttcttgtttttgaaaaataaatgcagtttgcactctccttgcttagaacttacgtattctatttcacaaaagtgcatgcttgtgttattaaatgtgtgtgtgtgtgtgtgtgtrtatacatatacatatatcttgatccctaatctcagttagctccaaaggtgttctaaatatataaatgttataggtcacagtgtgatctcttaacactatattttttggttgagtgtggtggctcatgcctgtaatcccagcactttgggcggctgaggyggaaggataattggagcccaggattttgagatcagccagggcaacatagtgagaccctgtctctactgaaaatacaaaaaaattatccaggtgttgtggcacgtgcctgtagtccctgctacttgggaggctgaggtgggaggatctcttgagcctgggaggtcgagactacagtaagccaggattgcgccactgcactccagcctgggtgacagagtgagagaccctttttcaaaaaagcctacgtttttcaccaacacatttcaaaattacttttaaaattattattgtttttaaagataggtatgtgccaaaattagaactttgggtccaagagcatctccacattcacataaagaaacttaagttcagtaacttgctcaggctataaagtagaagagttaggatttgaacccaggtcagagggctccaaagccctttcactttccatcaaaaacatttgatattttgccaaaaatatcatgactgtttgtccattkycatttcatatccttcaaacagctataaagtgtggagaaatgataacttcataactcacgctacagctcgcagacacacttaattagcttagggacaaacagttgtgacattatgagtgggagttgcaaggctgagttgaatgtactgatggggatgttggttaaaaacaaaaagccattctattctacatcgtggcaatctttgtacttcaaaagtagtagtattctgagaygtttactgtgtattatagaaaaattgctgatttgaatcacaattcagcaatactagagaaggagaaatctactttttctaaattttctctacagtgaaataaaatgcttttggaatatttacttgaggaatgggttatctgaatgttctcactgaaactcattacaccgtatagtgaaaatctagttacaggtagttgaagtgtaggtatagatagtatgtgattcataatgacgcatgtatgccatgatttacctcagtcactggacagtaagaatgtgattaaggaagtttcctctgcaacatttcaagataagttagctgttttgagccacacaaatattaaactatgcattgtggccaagtgcctataatgccaaaagcacctgtttcaaattgtgagtaatatcttatgtgttacactaytgaaatctccttgttacagaatattaatactacctattgaaaagagtaagaaataagagtttctcatttccacccttttggatttatttcatcaaatgatgtgttgatgaataatgccctttctgtaagatggataactcatggaaagaaagccatttggacatggatactcaagattttaaagaatttaggaggtggcagtgtgaatatcaaataaggtgccacttgtagagagagtatctcagaaaaggagcagagaatcatacaatagaaaagtgaaaagctgtttcctgtggtagatagactctaaataatgattttagagacagacataataaattaatttattggttcattgaagaaacatcctgagttcctatgacatgctaggcattgtgctggtgggggcgagggttgggtgagtagtggcgtatggagatgaaaagatgcatcagacatggtccttgtcttcatagaactttccacagggtaaaactggaaaaaccctgctgggacagagtgggcatctattccggcttaggcaagcatatcttatcctattgatatctgtacaatattatccttaaactagaaatacaataatatgttttattctgacaatgaggaataattttccatattaaggaataggttaatctctaaatagtatgctatttattttatcttactttttcctctgtgtttttaaatatttaacaatttaggtagcatcctagcagggcatcactagagaaataaaatgaagcatttttaagtaaatatattttacagatcatttggaattgtttcaaaaacttcattaacttttaatgaaccaaaaatatagttcattggaattaaatgttccatgtgaagatatttatttcggaaactacatgactaaaccaatggtaagttgaagttaaaaaagtgaccccaagagagggacaatgtcatattattattgttataacccatatatgtttaataatgaccatgcaggatggtgcatatagmaaataactaggtaaagtttctaggaatttttattctatttctcttctttcaattctaatgtatgggccaactcatcattttaatacagagctttgagagaaaatgcataaatgtaattttctgtatgatcactagatggcgccatgcttcccttagaatgaagctgctcaggaatttgcaagtgcagttctgagtatttcacatagaaacctggaagatgagacaattgtatttcccataaggttttgattcactaatatcatcaaaacaacaattagcacgtgttactttgcattcaaaaagggagtaacgattgggtttgtaaacagtatattgaaataatcattactgaggacaaaagtgaagcatgcctctaagaggtaattcggaaggtctcttttgctttccaaaaacatactagtaacaaggaaacatcttatacttgcttggaaaactgggtcctagtcaatgagctatgtcttaaggaatggaaatactggcaaatgtggtaaagtttacatagccattttctgcaaaccaagaagataaattgcattctgcctagtcttaggcaaacagttgggccatttactgttccatcaaaaaaaggattgtcagatccccaaaagcacaaggatgcatatagagtgtccatttaaacttcctgatcaaagatatacactcgtgaaggtggagtggaagacttctttataggagtatgattcatgtttataaaattggagacacttagaaagttgagttaaaagtgactcaaaggatatcttttcattgccctttttatagatggaaaaacatggatgtagctgtttcatacagctaagacactagtgcatcaaaacacaatacatttgtgagacatcttgttatgatttcaaagcagtttgtcaataaatgtgtatgttcaatggttacagtttgggatggtaagacatcatcagctcagaatagtaacatccttccctttatcttttttatagaactttaaacctggatgcaattttaagatcatatgcatcattttttctatatggtgattacattctagataaattaatttgtgatacactctggactttttrtattacatcaagttgaagtttccttttgtggacttagaaacaaaaaatttgcagtaataaaaatgaaaagagattatgcaaaaataattactaatgaccatgtttcttaggtgatgaatttaattgagtgttggtattttaagaatacgtgcatcaagcaaattataatgtaaccaaatatccagagatttgaggaggaatatcaggttattatcacatttcagagctgaatttttcttctttggttcattgactgcattgaatctttgttttgtgggtgatataaactttttcatttcattccttgctctaggagtgactctggggaatcattaggtacatgcttgttggttttccataataattatctctgagccctaatggtttctggatttggcctctcttcactttctccaactttaggcaggagttcagaatggccttcagttgcaaagagaagtataaatccaacttaccatctagtctctttctgtgtggtcttggcaaattttttaatcctggctaggcatgctgttactggcagaaatgaggttctgcctcaactttagctccagccctgccgttagcctgaagactttccaagatttagggagggtccatgaatatctcatcttcaagagtgtgctatagagttatcgagcaactcagatcttttaaaaatcttgagtttaggaatcatacatttaaatgtcagttctcctagaaaatgaagattttaatcctttagaaaaaaatctagggacaaggaattctagcatttcctaaagattccatcataagtagtgcttttaatgtaaagggtttctttgaaaaaaattatttctttactttttttttttttttccttgagacagggtctccctttgtcacccaggctggagtggagtggtatgatcatggctcctgcagcctctacttgctgggctccagtgatcctcccacctcagcctctcaaatagctgggactacgggctcacaccaccacacctgtctcatttttgtattttttgtagagaaggggtttggacatgttacccaggctggtcttgaattcttgggctcaagtagtccttctgcctccatctcccgaagtgttgggattacaggtgtgagtcgtcatgcctggctgtaaaattgtattatatttctaatatgaagaaatacttggtttctctttactgtttagaaagataattatcatgattgttttctttattaactcctatatgatactttgtatttttatcccctgctactcaccccaagcttatttttataattagaaaggaatcaagctagccaaacaggagttatccttccttaaggtagagaagttactrttttttttcaaatggcgatctgcctgcctgagttgctatttggatctctgatgatttcttcctttgatcccctaactcaaagcaggcaatcaaggctatgctgttagttgtaaccagatggaaacctgatctccatttatactttgcctcttgtattgataacaggacatgaaccaggatagatacactaacagtatttgactctgctgcagttgccaggctaaataaccagaactcatatctcattctactctacctatggaaacactctgtataatgaaaatgtgtgttgaaagtgtgtgggtatatgttgtgtgtatatgcattaaaattctcattagcatgggctggttgtaatagtgcatacctgttatcccaactacttgggatgctgaggcaggaggatcatttgaacccagagttcaaggccagcctgggtaacacagcaagaccgccatctatttaaaaaaaaaaagtaaaaactctcatgagaataataattaaagtagctatgttgatcattgcagtaattaaaccaaaatattaatactcatacctgatatagttttttccactttattataattacatttctctcaaaaaatttaagaattagtatatgtttaacatatacaggttgaatatctcttattgtaaatgcctgggaccagaagtrtttcaacctttgaattttttttttggattttggaatacatgcatacacatagtgagatatcttggggataagaccttcatctaaacacaaaatttatttatgtttcgtatatrccttataaacataggctgaaaataattgtatacaatattttaaaatgctttcgtacgtgaaacaaagttttggctgtgttttgactatgacttgtcacatgaggtcaggtgtggaattttccacctgtgacatcatgtcagcactcaaaaagttttggattgtggaacattttgcattttggattttcagattaatgatgcttaacctaccttgtgaaataatggagtcctttattaataacaaaacaataatagatgatacttacagagtacttgtgtgtcaggctctactctaaacattttatatgtattaaaccaattaatcttcacaaaaactctgaattagatatattattattatttccatattttagaggagaaaactgagaaacaagtaatctagtctgtactctaccataatgctatgttacattctatcaacactcccactgcctcttctgaattcattgatagtggtgtggtggcatagagtccacagagtggagcattaattaattttgcataatgtgaaagtaaaacttaagaaaattttaaggaatagacagtgtgcagtgttatggaatcataactatacaattaaggggttaaatgaaatcatgcccaaaatgctgtgttttaaatggtggcactgactgataaaatgtagatttgagttatttattgtttctacattctcaagtgaaaaaggaagaaagtaggaataaaattctggactattggggggggtgtctttagtcttgcaaaaagtaaaaaatagaaatagaagaaagtttttatggttcatattgtaacatcaaaatatggaatgaaaactgtggtctcccatgaagtatttcaggtgctggaaggaaatctcctagactaggactctcagcaagtccatggttcctattatgtccagcatgccatagaaaaactccagaattagttaaatwttaataatttaatggagaaaactaatttttcaaggggcagctagttaacttcagcatgagtcaaaaagcacttcatctgtcaatatttatgtaaatatttattttgaattatacatttatttagagtatttatttacattagaatagagggaactaaggccgggcacggtgactcatgcctgtaatcccagcattttgggaggccgaggcggacagataacctgaggtcgggagtttgagaccagcatgaccaacatggagaaccatgtatctaccaaaaatacaaaattagccgggtgtggtggcagatgcctgtaatcccagctacttttgggaggctgaggcaggagaattgcttgaacctgggaggtggaggttgtggtgagcagaggttgcagtgagccaagatcgtgccattgcactccagcctgagcaacaagagcgaaactccatctcaaaaataaagaataaagggaactagccatctgatcatattacaaccaaagccttttattttcttcataacctaactgaatgtgtcaaacagtttgtgattctgtcctccaaatatgcatgtatattccaaaagaatctgtgaccctcagtaggcctgtttttaagtcagtgaactaattctttctttctttcttcttcttcttcttcttcttcttcttcttcttcttcttcttcttcttcttcttcttcttcttcttcttcttcttcctcttcctcttcctcttcttcttcttcttcttcttcttctttcttcttcttctttcttcttcttcttctttcttcttcttctttcttctttcttcttcttcttcttctttcttcttcttcttcttttttttcttgaggcagggtctcactctggactctgtccaggctggagtgcagtggtgcaatcatggctcactgcagccccaaactcctggaccgaagtgatcctcctgcctcagcctctgagtagctgggactacaggcatgggccaccatgtctagctattgttttaaattttgtagagaaaagatctcactatgttgctcaggctggtcttgaacttttgaactcaaccaatcctccagccttggcctcccaaagttctggagttacaggcatgagccaccatacctgctaactaattctgaaagataagtcatagtattgaccataatagtgatgaaaataagtggaatcccaggaggaagcctcatctgcatgtggtgaatatgtaacagtaaagaggatgatcatagtaaggctttctactgtgcatagcatgttagcttttactcttgcttttacatattcatctcatttaaagtttttgctcattttaattattctatgatagatatgacagaggcagggaaagtattatcctcttctccctttactcccaattacagaggagtacctgaatcccacagaattgacatatttcctcaatatcagttagtcaacatcaaagagacttgaactgctatagtcattatatgcagtcttaaggacacactctccacattttaaggtttaaggatggataggatttccacagaagtataaacagaaaaattgaagacagaggaaagaatactggacaagggcaaaaaaacaggaagtatggtacaacttggagaaaatgccagtgagctgctaagctcaggtacaggatgaagagaattagcaggcagatgttgatggaatgccgcaggaagatccatcttgaatggtttcgtgggaacatagactggatgtgtgatctaagaaatataagactagtgggttagactcagcaaggggtaatgtggagctaagtttgatgactatagatatggaaagactcagggacagatgctacagaaatttcaaagttttgataccatattacacaaactaatatggcgcttgaaaaagagtgagacatctaagatgattctcaggttcgggtctgaatgactgggagaataatgatccaggaacagaaatagggaaatcatgagaagatgctaaattgggaggagatgctgggtgtgatttgctgagtttgagtacaagcagaccatgcaagtagttatgtctaacttggaagcaaagtaatggtgtgcacctgtagtcccagatattctggaggctgaggtgggaggatcaattgagcccaggaggtcaaggctgcagtgagccatgatcccaccactgcattctagcctgagcgacagagtgagactctgtctcaaaaaatgtaatgcaatgcaatgcaatgcaacgcaacacagcaaaacacaacacaacacaataaaaataatgccttcagaacctcccccccaaaaaaaaattctaggagggaagtggggtaagcctagtgaaaattctcaggctaactgacaatgtgtatgttttgctaaatggacttcagttggcaaatcaaatttttgagttagacattaataatattgaaatgtaatatccacccacattgtccatttcatagaattactctgtttttgttgttcattttgacatttcctaagctgtcacttgacccagactgacacattatcatctgcatgcacctaggctctgccttatatatgtttacaacatgcaatgaagcctagtgcctgtaatcagaaagagggtgctgcagtccatcatgtgaaaaaagagctggactatgaatgaggaaacagattttactctgacatcaaggctggccgacagcatctgtcatgcccctaacacaatcatgctaattataagccatcactttcattcttcttggaattcagaagtcaggagggttgtaggggcaaatttctaacgggttgtggaatctatcattgctaggaccttttacaattcagttgcttactctttttaaaatctgccattcagcagtctttttcagtaccagtaagccacgctatgcattcctatgaataaagtgcacagcaacagcatccaaatgcagtgacggaactgtatggcttctccttggaatagcttttaaaaacctgcttaggcagggacactttattgcttgctgaaaaattccaaaagatttgtgactatgtttaataaattatcaagaactatatagaattccttagaccttttttctaaaataaacttttggagattttttgtttgttggttgttactattatttttagagaaaggacaattaaattatcttcagatcccagggaatggtagaattagtctttttggcactgatagtaaggtaggtcatgtcttagtccatttggactgttacaataaaatatcataaactctgtagcatggctgggcacagtggttcacggctgtaatctcagcactttggaaggccgaggccggtggatcacctgaggtcaggagttcgagaccagcctgggcaacatggcgaaaccccatctctactaaaaatacaataattagccgggcatggtggcgcatgcctgtagtcccagctactcgggagtctgaggcaggagaatcgcttgaacccaggaggcagagcttgcagtgagcagagattgtcccactgcactccagcctggccgacagagggagactctgtctcaaaaacaaacaaaaaactgggtagcttataaacaatagaaatttatttctcatagtgctggaggctggggagtccaaagtcagcatgctacagatttggtgtctggtgagggccaggtttctggttcattaatggtgtcttcttgctgtgtcctcacttggaagaaggggcaagggagctataacttggaagaaggggcctctttaatatgtgcattaatcctgttcacaaggctggaggcctaatgacctaattacctcccaaaggccctacctcctaacactattgcattggtgattagatttcaacatttgaattttgggagggtgccaatgttcagatcatagctggtcatttcagcttatttgtactctctaagttatgctgcaataattgttggcttctgtacatgggcaatatggaaattaaagcaatcataacattttggtagaggacctgaggagagattattctgaatgtgatgaagttatagtctttttcctcaggtggattagatcactttttggatagaaattttatgttgggaaaaataaaaatggttcagtgacctgaggcagaaaaagtctgttcacaggaatataagataattactccatcaactcacagttgtttggaatgtcaggatcaataatagtcctcagaacattgtaaccttactccagcaactatgctaacataaagcagagaagtctgaagtctgtccattagtattggtgacaaggtcatggttgcttttaaactttgcttgccaaaatacctggagggaactcaatgtgcatactcaagtttctgctgtggcaaattgactgttgctaccccaggagaccctaggaagacaatcagttcatgtctgactggagacattgcaactttatttgtatgaactatttgggtcaaatttcagggggacatgtcactacagaggggcagagggtcatgataatgaaaagaatcattacgttatattggtaattagatgtatgactctacaaacttgtttttccttgggtgttagtaacattctttttggagatagatggcattttacaaagtctatccacagaaaactggaagtatctaaagataatgataatgacgagaatatattcattgtaatctggcatacagaattttctctgccatttaagaagctgaatttcttttaagtatagaaaggttagacttatcaaccttatttgcagatactatttatgtttttcatgttttctctctgtccttaaatattttctgagatttaggcactgagctctctgctagacattttcaaattttatcttttaaaaaatcagaaaacctctctttatgaatgaaatttttcacaaaactctgatatataaaacaggcaaaatgaaaccattatggcaggaatgagtctgggatttgcctatttatttttctttcttctttctcctgtctgctaaattttctacaagcaaggcaagcagttcatgaatcaactgttgactacttctgaaacctaaaatgaaataatatatatgaaagctgttattcagtgatttatacttatcaaaatatacttgtcaaaatattaactgatttgtgtttgtcaaaataaatatattcatacatagcaccttggtaaatcacagatctagttgtattgtaggtgcctagaccaacatgacaacttgattatatggcttgagatatttacatcactcttaccacaaaaacgtcaataaacagagcttattaatcttttgaggaggaggaaatgaaggtgtaggaaagcatgtatgaagttctacagcatttgtatacatccatctttgggaactgagtgagcaaaaaagaataaaatgttgatattagcatgaaaactctcactaactctataaatttcttgtcaatattaggcctgtttctaaagccaatcagaatgaaggaagagctttttaaaaataggcaaatgttggttacattggcttcaattttaaaacaaagttctacattctcttcagaatgcgaaggaggttgaaaaaggaggcatttcctgcatatattttgagatgagacgagggtgagaaaaggagtagagctgaatgttatgttattctgttaacctttgtcaggcccatcaggctttatatggttcaaatttctgctgtatattttgatactttctgtctccacagcagttactcaggaatatatcccaataatgacactgaaaatgcagtgaatttataaatagatcccgctgctgcatagattccattatttagaaaattatacagsgttctgtaggaggttgaacatacagtaaaatagttcatttgcttagaaacaattattataattgttattataaaatctaatagattattagaaatatcacaatataatcaagcaagcatcagactaaataaaatgattatttaatatttgcttcatatgataaagaaaaacttaaaattgattttctatttgaaaaatatcaacagaggctgggcacgatggctcatgcctgttatcccagaactttgggaggctgaggcaagcggatcacctgawgtcaggagtttgagaccagcctggccaacacagtgacaccccatctctactgaaaaaaaaaatacaaaaattagccaggtgtggtggcaggcacctgtaatcccagctactctggaggctgaggcaggagagttgcatgaacccaggaggyagaggtcgcagtgaggcaagatcacgccaatgtactccagccttggagacagagtgagactccatctcaaaggaaaaaaaaaacaaagaaaaatatcagcagaaataagtgagttgagtaatttctaaatcttatttcctatgtaagtggttaagaaataattaacttttgttctagaagtattaaggagacaaattgcaaaatttaatgtgaagccttggctcacaataaatactttctttaaacttaggatatatttaaagtggaataatattttccaacttaaaatgtaaccatttatttttttctttaatgtgtttgtgtatacatctccttctttgtcaaaggtttgagtagaattagaaatagctgcaatttacaaaactctattttgaaaggaagaaaattaataataaatagcagaagtaaaagttatctttctggaatctaggactctcacccactctcatcttcaatatttaccccattgtttcacatatggaatattataaaattaaaatataagagaacggatatgttattattcaaattattttcattgagggtggtttgcccagtttcttagaagcaattaaaaggagaggataaggtggttttcttaaaatagtgctttctttctgctgaatttatgtaacttttttaagaatggcaatctaagtgtacaaatgatgtttaattctcatgagatttcattttaaaccttgctttagagtaaactttatgagtaataagattatacgtgtgggaaactgaaactaaaaggattcaaatggttttgacaaacaacagatattcagggtcagtgcaaataaggttacagataatcactccatctgctccattgtcagcaaaaatgaggcccaggtgttgcagtataccttgtcctttctcctgaattgtgaccattgacaaataagattttcaaagagaagtctgaattccttagggtttagcctgagctcttgtaagagtttctttccagccaaagtattttcttgttttcctgtcaattcaatgggttagaccattccatccattagaagaaagtagaggaaatggctcaaccttgcccagagtacagctggttggaactctgacaacggaactgtggcccagggtaaagagcaagaggctgggggaagcacgtaatgcttcttaaagcctttgatctaaaatgacagactgtcatctccactcacattccattagcccaagcaagttttgtggctaaccagacaatgggtctcagcaatatatcccccctcccagaacgcctgaacattcaagtggcaaaagagtgaattgttgagaacaataatatagtctataatagcatataatgttcataaaattagcaccccaggcaaacaggacagaatgcctatccccagccacagctttatcctggcctacaacgctcatttatactttctttcctgtgtgaaatgaactacacttagtttattttaacctgatttttacaaacccataaagaatgcaagagatgcagtgggccaggaagaagtgagaatgttgccctatgtgtgattttttctagaatctgtctaagttctgctttattcctggatatcttgatatggaaaattaataggattgcatggtaacttccttatacacaagtttatttacctaatttagctcaggagtatgactcaattactagcaacctaaacatgcaataatgaagggaatctccatgttgcttatgcaaacatctagagtcatatgtcactttgtaagtagacaaaatgtagggcatgtgggctggacatgtcaacatgctgctgactttatctgtcattaatttttgttgtgtaaattagcatcctaatgacacacccccactgtattcattctgtgccctgtctcgccccttaacttggagcaggtaatggagtttttaaacatcatttgataatttgccctcttcagaaagtaatactaaggaaaagctatttaaagtgagcagaattccttttatctgttgatttagaaatattatttatattgccagaaatttaaaatgttcaacatgtttatagttattaaaactttgtaaaagtaaagtatgttaaatcttcaggagtatcactggaggagctagatgacaaaatatatatatatatatatatatatataatattatcatgaaaatgcagtgctggcaaactgctcctgggattataaatatatcagtaaaaccaccctttctcctgtatcctttcagcattagccataaaatagactggccagtaggggttactcttggcattatgatctaagagtggtagattagagtttgaagacataatgagtggtatttttaaaaatagctattatcgttgtgaatttaggtgcaatattcagaattcagaattggtgataacttgctttgagcactgtttcagcagcttttatcctattcatatgactgtcagacatattccaggaactattttacttagccttgttgattgtccctcattaaataaaatccacaggtcaaaattgtaaagtagccttttagttcaatttggcatctttttttcctgggtgatattctcagtcccaggggtttgaattccagacatccttgaaaacaaagccttatatgaatgtagtcagaactaactctttaaaaggcaaaagcacaaccacattcagttaccctaaagtaactgtagtcaggtggctcttcaattttagaaaataaattactttcaaaaagaagaaattagaaaagggaggaaaaaaataatgaagcctcatggacatttgtttttgagagagaaaaaataaataaaaggaagtggttttaaatattggtttcataaaaacaaaacttagaaaagctttttgtctgaagcccaaatggttacaaatgagctctgcttactaaacatggggcagaaagagttcattagaataaaatactattaccttcagaagaaatatgtattaccaagggatgaaatgcaaaagttactaattcaatatttatttatttatttatttatttattttggcgacagagtgagactctgttgcccaggctggagtgcagtgctattatcttgactcaatgcagccagcctctgccttctgggttcaagtgattcttgtaccttagcctcgtgagtagctgagtctacaggtgtatgccaccacacttgactaatttttgcattttcagtagagatggggcctcgccatgttgcccaggtgagtctcaaactcctgagttcaagcaatccacccatctcggcctccccaagtggtaagattgcaggcatgagctaccatgcccggcctacttcaatatttattttttaataaatcaagtttgttatgagagagttgtcagagaataggaatcttctaactgctggtatcttgatgcattcagagctcaaggatgtgtggtgtggttcagaccatttcgtgcacactgtagcagaaggattgccctttgatggctgggcaagggaacattatgatagatgagttatcaaaatattgctaaaattctttaggcagtttgatatagatgttactgtagctggacactgtcagagaaaggagatagctgtaacagagtaccaaatgaaaaacatttttgaatagactgtccttaagacttcttacctacgaagactcctaatctcttcttatgacataattatcggaaaggcctggaggccacaccttgagaagaaaagcacttatcagttgtgattttcattttcttcacagttttctccactcagctagcttacagaggaaaccaaaatgcagttggttgtttctctttactaacactcagttcctaagtgcttagctttagaagttttttctgcctgtttacttccacttcttgtgtgacataacaatattttagggttttatttttcttttcaaaattcttctggtctttggaaagaaaattaagacactatttactctatgtttgctgatgcagaaccagtaagtttgttcacccacccaagtgattcattctaagcaaattctcccattaggcatttgttgmaaatctgcaaaagttgcttttatttactgattcaacatatcccttcccagtataaggatctcctttgacggtgaaaatctccttggattgcataggttttcattgtacagagaaggcttgaccttaaaaatttaagtygcattaaaatttcttttatgttttagagagacagaggcactctgttgcccagactggagtgcagtggtgcagtcatagctcaccgtaccctcaaacccctgggatcaagtgattctcccacctcagcctcctaaagcattggcattacagatgtgagccacctgcttggctgaaacttttcttgaaacacacacacacacacacgaacactcacacacacttttttatttataaagatctcaaccaactttttaaaccatgcaataaaggaatatctttggcattggcaatgtatatttgttgactgctggagtcctttgggcaacatcaaacacccaattgctcattttaaaatctggctttccacgcctgtaattccagcactttgggaggccgaggcaggcggatcaccaggtcaggagatcgagaccatcctggctgacacggtgaaaccccatctctactaaaaatacaaaaaattagctgggcgcagtggcgggcgcctgcagtcccagctactccagaggctgaggcaggagaatggcgtgaacccagaaggcagagcttgcagtgagccgacatcgtgccactgcactccagctggggtgacagagcgagactccgtctcaaaaaaaaaaaaaatctggctctccattttgggttcttaggtagatggaatagagtttccagacttgagggttttaattcagcaacccaggatcaacactttctaggtgtgagactttagtaaataatatactcagagattcatggtttttttttaatctataagttgcagaaaataatatcactatcatgcttttttaaaggattaaataagatatatttaaaaatttgttatccttatacctggcatagagtaagcgaacagtaaatggtatatttgtaattattcttttttacgttgctttctacttaatatgcgtttattaagcttcaccttaagtataatttagcaaaggattatttcagttttcccttaaaccagtttataagtttacatagggaggttaaagccaacaggaatttttatgtaataaggaaattcaaatatttcagtatctgtgataagagttgtgttaatttgcagaggaataacacaaaacattgattaaatttggattgctaaatgttaaacagtgtttgtacaataaaagtgtgattcagaaaaagccttattataacatgcggaatgtattagcactctttggagacttactatcttttaatttattttattaagctgctgttgtgagctaactaataacataagtgtgaactagtttgaagaagaattgcgattttattgaataatattctgcaagaattaaatatcaataggttagcaatatctcctcattgagttaaagtatatagattgtatacatgttctatgtatatactatatataaatgtttagatagtatatatgaatggcataattactataagcttacagggaaatatgcagagttgctgttatttttagaaagtaaatgatgacatttattttttatctaaaactttaatctgttcagtgatttagattcatttgagctctaatgatttggagagtaaggcacaggcatagccttaatttattggtgatgaaaaaaatctacttattggcaagatgggggaaaaaatcacaagccttgtatggaattgtatgattctgcagagttgcaatggtgttaacaattgtgacaagttacactttctgagacaatcttcaattttagcaattaaaatagcaaagaattattatttataacagtattcataacatagcaaatggtcatattccttatagagacagcacttccgagtagtctttattttgtttttcaaatttgtcctttcaatatctcaaaatatcttgtgttgcaattacatttccaagtatatatttggttgggatgaaaatagctgtaatagtagtagtagctaccatttattgaattcttgccacgtgcctcatattttatgtggtgtatttgatcttaggccttaggacaactgtaaaaggcaggtattgtagaagacaatgttttctgagagactgaaatgacaaattagaaaaaaagttaaagacttcttggaaatgctatctctataaggaatatgaccatttgctatgttaatactgttatgaataataattatttgctattgtaattgctaaaactgaagagtgtctcagaaagtataatttatttgtcacaattgcaactctgcagaatcacccaattccatacaagacttgtgattttttcccctaacttgccaataagtattattaccataataaatatgctgacgtttcaaagtttaagaaacttcctacagttctcacacgtagtggtgacaatatggctaaggggttaggaatgcccacatcctcctatgctgcatcctgcctgtggtttagatttgagatagggacccctactttctttcccctaagagcagatctgtgtcattggctataactgctttctggtcagccacatgacacgtggacttaacagatggtttctaataagattgaaagcatatcttgactccacttacctggccagcactggagaaaggaagattaagagagatttggatgagtgtccttgtcacataacttcccctccctagaaaacttggtccaatacgttgtaatctggtggtgcaaactcacaacttttcttcccttctgtgagtgtgtatatatgtgagtttattgtatgtgtgtgtaaggtgtgaatgtgtatgtgaagtctgtgtgtgatgtgtgtatatttgaatgtcctgtgcatgagtttttttgtgactgaagtgtgtgtgaggtgtctgtatgtgggatgtgtgtgtctgtgaggtgattgtgtatgaggaatgtacatctgtgtctgtggtatatagaaaacgtgtgtgtggtgtatgcacttgctgtgtctgcatatgcatgaattgagtatgtgacttgagtattgtgtgtgtaggaggaggggggaagtaaaaaggcaaggtgacagtagagactggacaaatgaacatagccgggcactattcctttaactcctagaacagacataacttgaagtgatctagacttgaactttggagtatgaagttccagccagctgtgtaactatctatttaatatttggaagcgcttagcctgcttaaatcttgattttatcatttctattagagaagttttaacttaaatgctctaaggtgggggtgtccaagggagaaaatacagtcatgggttcttagtttctgtttctggttgggccagaaaagctccttcctcatccctcttttccacttatcaacagagacagaagctaaaaaccatggcttctggctgctaaagcctaaaataaaacaaaacagaacaaactcatcaacaataacagcaaaataaagcaggttggaaatgactgctctaagggtgaagtgaatatgttcaggttggagttactgataagttgtaaacaattacaaggatgtaaaatattgcatatttttattagtggcattacttttccaacattacattttatattgaagttccagaacaacaaaaaaacactaaaggtattgcagtgaggaacttatcagtaagtgcttctaccttcaaggaattaagttaatttttattggcaatatttggaacattgtatcaagaagaaagactagctaacgaatctcttttgcacatcaagctcttacagtgttaattcattaaacaactaagacaattttaagtaggagctttggtctaagatgtgtggccgcaaactgaaccaatactgacagaatttggcattaatttttttttcagagaattttttttttaatatatggcaatggttgaaaaaaaacatagaatattgtagttcctcaaattgttaaacacagagttatatgatccagcaattctacttctaggtatatacccaaaagaattgaaaatacatagacaaatgttcacagcaacattattcttaatagccaaaaagtggaaacaatccaaatagccatcagctgatggataaacaaatgtggtatattcatacaatggaatattattcaacaataaagaattcagtatcaatgcatgctattacatgtataaaccttgaaaacattatgctaaatgaaagaagccggaatgacataatttcatgattccatttaagtgaaatgtccactatagacaagtctatagtggattaatgattgcctagggttggagggggtatggggaattgaagattgagggtcaaagggtttggggggtgtactgaaaatattctaaattgtgttaatggaggcacaactctgtgaatgcactaatgtcactgaattgtacattttaaacaggcagattgtgtggtatttcagttgcatctctataaaggtgttaaaactaaatatagaacaattttcctaagtagtggcccctcctcatttattggaccaatagtttgggaggaaccagtcatgaccttcctgatacaaatcaacacctacagataggatgggaggcaattgtgctaacaaagtacctcaaaccacaaagtctgtcagtaaactgatgcttttgtcaaggatgaatgaccaggggcaggtaataggtgagcaactctcaactcttttgtatatggtactatagtctggaactagcaagtactgaaaaacgctagatgataaaagtcattgttattttattcttccctctcccttcctcccctcccctgtgctccctttcctcttcccattttatttatttatttgagacttggtctggctctgttgcccaagctgagttcagtagcagtatctcagctcactgcaacctccgcctcatgggcttaagccattctcacacctcagcctccagagtagctgggaatacaagtgcatggcaccatgcctggctaatttttacatattttgtagagacggtgttccaccaggttgtgcaggctgggcttgaactcctgggcttaagggatctgcaggcctcaccctcccaaagtgctaggattataggggtgagccaccacacctggcctcccctccctttttcccctcccctcccacccttctcctctccccttctctctcttcccttcttcttctttcccccttttcctcttccttcttccctcctstctttccctttccactcttttctccttccccactcataaatagatattataatgaattaatttagaattatagttaagcatacatttgaagtaattgttccaatttcataattttgaagtattttctgagaataaactgggcaaatgcagaattgggacaaatcctatgtgcaataattgctaataggaagtgttctgaagtatgaattctctcctcctttcttgtttgacttgtcactgaatctccagtcctacagagtactatgtcctgcttattgtttatttataccacaccccacttctacgtataaacatcactttcactacggtggattcaaatgatctcttaggaatttagttacattacagtctcacataaaattactgcccttaaaaacatttgtttgctgggcagggagtggcgaaaccccatctctactaaaaatacaaaaattagccaggcgtggtggcgggcgcctgtagtcccagctactctggaggctaaggcataattgctttaacctgggaggtgcagcttgcagtgagcagagattgtgccactgcactccagccttggcaacagagtgaaactctgtctaaaaaaaaaaaaaaaaatttttttttttgctaacattatttgaagaatagtcagttcagtatgcatctatgtagacctaaccaatagttgtattttacaagtttcagttttgaaatgttggatgatatctttcagtttaaaaaattagtatttctataaagtgtctttttttggatggaaatgtttctggaatgtgacacttaaattttaattactattattaaatatcaatggatttgttttgcataaccaaacagttggataagttcagtttatgtgctgtgcaatactaagatatttacttggcatggagagaatcactggcttactaaataaaagaattcagcattttgtttgtcaatcctatgttaattgcatttatatttctgacagtttccttgatggaattaaaaaaaaaaaacatgcaataagatctgaattgagtgttgaaatgagtgtttcctgagctccaattagtgaaagtattgagatttgaagaatggttgaggagacaaggttttataattgcccttctgggaaaaagaatgagtaaacaataaagtcttgagatctctcaaacaaatatacagtcataaggaaagtttaaaagccacagtgaaatgcacacctcttaattatgttaacattgatatctattttaaattgatatcaatattagctgtgaaagtttcgtatattttgcagggacaaattctcttagtgtactccaaatgcttattgttacacatcctgagcacacaacgcaaacatattgggcaagcaaagaatctaggctgatatgtgtgaatgcttatgtggcattctatcaaaggagatagatgtacataaggggaattatggagaagtgaaaatttgtctaaggttcattttttcagtagcttaattttaatagtaaactcttttaaggaatgaatggccacaggcagagactaatggtgtactttcagtgttctcagtgagtgcttcacagattaggtttccaagagaagaagattgcctctgaggaagaagagatggggtagcaagaggcatatatgagaccgttcttgggaccaacacctatggaggggagggaagaaggcagaattatgggaccagatagaagaagttggtctgcaatgcagtcttgaggaaggcctcagcagagccaatagacagttccgaagctggcatgcccttgagagttgtcctaaattcgggtgagagggttaggcctttatatccttggtcacttgatagtagatgctggaacaaaatggtgctctttagctaaggcaatttacagagggctgacagctgagagcacttgtagaatctaggaaaatgagtctttcattcttgaaggggaatcttcacatcatccactacaaatggtgctatattttggaaccagcagacactgagaaatgccaggtggatagaatccttccttcttttattctatctttttttctttctttctgtctcctaatctagtgcttctccaaaaatacttttaagaattagaattaggccattagttattataaggaaggaagggaaataatcattttcataaaactcagcaattcttttaatgtcaagatatggattattattacactcaacaattataattattaatattttccacggaaaagtttcatatattgaatgacccaagtactccatgtgaccttccctgtctatgtaagcctagcattctgtcagccaaataaaattttggaaggaaggtcagataaaattattttttcactcggtgttaaagaaaagaaaaaataaagaacatttattgagcatgcactaaatatgacataaaagatctttgttttctgtattagaggttgagaaagaatgaaacagtctattgatttgaaaagctttgctctcatttagcaattattattattattattattattattattattattattattattattgttgagacagagtctcactctgttgcccaggctggagtgcagtggcgcgatctcggctcactgcaagctccgcctcctgggttcacgccattctcctgcctcagcctcccgagtagctgggactacaggctcctgccaccacgccaggctaatttttttgtatttttagtagagatggggtttcactatgttggccaggatggtctcgatctcctgacctcgtgatccgcccacctcggcctcccaaagtgctgagattacaggcgtgagccaccgcgcccggccaacaattatttttataaaataaaagtttattaatgaatttatacaaatagcactttataaaaactacaacacattcatttgggctgggctgttgcctggttagtcacattttttcttctttatttagctattgcacagcttctgaggcaaccacaaaaacatcaaattatggagaagtgagtgcatagatatatgaaatcaacatttcaaattggtaatagaatgaccttacttattaagtagtgatcttttatcaagctgctacaataaaatcgaccataacattaaacatggtagatgttactaaccagaaatcttaggtatttaaagttatgtttacttattttttttaataagacttggaagtgtcacttaaatcacacttaagaatggatattggctaaaggctgctgagtcttttaagattcctgtgaatttttttcagattgttcctcagtcaattcaggatacttgtcattgctggctatacagcagagtgcagagttagcccttgcagacacacaaagataactcaaggcactgatttctgcatcttcagcctcctcatttcattaactattaaaattaattccctgtagagataatttgcatcaatcaacagaatagaagaattagaagagcttctgaggcttttctatgactaaaagagcaattcttttattgactaccataaacattagatttactaaaaggaaaaggtgttttaaattgaaccacccctctaatttattcatcttagttctgaaaacatgtaggtaagagttaatcatgttactgaatctaatttaaaaagtgagagggaaagtactgaatatttttcctctttgaaattacatgttgtttgcaatattagcctgcctgtatttttcatgtaaaccttttgtacattgaaaacaaattcaaaataaagaacgtttgttttcaggctcagaccttaagaactgatggtcttttcttttacttctacacaaaagtctaagcagttctgaagaaacactacagtgacattgggtcattgctaaaaaaaaaaaaaaaaaaaaaaaaaaaggttcacaaactatcaacattttaacaatctaatagttgattgttgtttcccaaattggtgattttgaatgattattttatgtagaatggaactgtgtctttttcttcattcatgcaacaaacatttcctgatggataccaagcaacggtgacaggtaagcatgccatcctagatcagtgttatataactcccaagcttcagtgaaggcctcatttttgttattacaaactgcctctctgggacctcatgaaggtactattcctgtttcgggaataggtctatccatccttgtctttttgtttcctgtcttgattctacaatctcccctttggccattaccatctcaaaatcctgcttcccaaggtaatccgtctagcttttctaatcttctggcttcccattactcatttcaattccttcttctggctccctgttgctttcctaaccaatttcaattacttatccttatcttgaaggccattcaccactctgccctgctgacgtgtttttcttatcacccaagattcctcccccggctcacacttctgcatgcaagcacgttcccaaagtatgaaaatgctttggatttatatcatgctgttgccttgaagagttttattctcttcctcatatcttctcagagaagaaagtaatttggctgtggttcaaaattcaccaaggcagtaaaatcttgtgttttgtacacaacttcctttctaatgacctctccctttcttcacctcacattgggcattcactcataactatttaagggccttctcttaggcggctgccctgttttcaggttgtgccctatgtggtcacaagtggctattcttaataaatcatagaatcgtagaatttaagtactgacagggatttcctatatataagaatccaacttcctactctgcagaaatccatctcagaacattctcaatgcttaaaattgccttttcgggagagaacatcaactcgtaagacaagctctttccttgttgcctaggactcatttttagaaaaatattctttgtaatgaattgtttccctgccacttcctccctttggtatgaggcatgttgccagaaagatacaaaataattctaataatctttcttagccttgataatgcaagagaatacagcaataatttcctccattaaaccttatttttttttttttttgaggttagatgcctaaattacttcaaggattcttcttgtggaagcatttttgagaattttcttgtctttctgcacctctgatttggtaacttgaccagcagacttcacaagaagcttgctgtcagtgttagtccaaacacaacctatcagttagtgtgtttagtcattaatatttaagagtgttttcataacctttaaattaataattagtcatctttattctttaatgactacagaagctcacattcatagtattttggtaactaaggtatccataggctcaaaaactcttcaaaattattgtgtaatgaaaatgttaaccatatttaagagagtgacttggaaaaaggccttgtttttcaatctcatattttgaagaactattgagatgtcactgaatagtatttttagaatttttgaattgctcacacatgagcacttggggaattggtcagtgaatatatctcctgagcactttgttccttgaaattatcaaatccttcttggaatttctttttctctctctcgtgatgtgtgggtgggactgggacattaccaacacaattagaacttcatttctttttcttcttagtgaaatttattttctaaaaggtttgtgtgtttcactctattagcagttctggaatcatccaagagtctaagtagatgtagcagagctcttatggaaactctggatatatacataatcacacagagaatttgtatttaattttagagttacatgtaccactggaatcacattcatatttctattacagtgtagtgattctgggttaagaatcactgatttagttctacctcattttacatataccttttcctgcaaagatatataaaaataaaatcatatgaataagttatgtgtttaatagttccattcagtcatctcataagacaaaattactttctaagttaattttaattcagatctttatagaatattgaggttttaaatgtgaacacatatatataattttatgatacaaccttttcttctgaatacttaaagtgttttcacagttggaagtatcaaaaactttgttctctgtaaaccttcagcttccawccttcttcagtcttatctgcagttatctcctgcacatgtaaatgatgtggtagaagatacggtttaagatgaattttagttatttaaagtgtgtcataacctgaacattttacagatatatttaaacaggtataggtatatttaaaatcactattttaattaaaaaaaaaaaaactttgaaaaatccctaatttcaaaaatatatttaaaatgtacatatatgaataatatatagagaaagataggaaatattaccatgaattatacagacctcagtttatctaaatttacagttttaaaataataatcttatccttattatctgaagatgtcattgatgatatgtttcatttttatatttggctttagtttaccaatattaacatataaattattaaacaattgtacaccagctttgtggtctctcctttgtcatgtgtgatttgtgtaatttgatgaacttgatgaaagcttccatttcaacttgaaggctgtgaatatgccagattatgtgcattttgtagtaaggattatggagctgaacaagtatgacagacttgttaaatatgttgtctacaaatttttttttgtttttgtttgagatagagtctctctctgtcacccaggctggagtgcagtggcgtgatctcggctcactgcaacctccacctcccgggttcaagcgattctcctgcctcagcctctcgagtagctgggactacaggctcgtgccaccatgatcagctaattttttgtagttttagtagagacagggtttcaccatgttagccaggatggtctcgatctcctgacctcatgatccgcctgccttggcctcccaaagtgctggaattacaggtgtgagctaccgcacccggcctattgtctacaaattttatcacttttggtaagaaatgcacaaagcctatcatgatgtcattgctagtttatatgtttgtgaattttaagccaaacaagcgttcaaaacgtttgccacaaatcgaggacctaaaacccagttttatatataaagatatttaaaaacatatttctggagaactatgcatatactaccaacacttacaaggcaaattaaattaaaaatgttgtataaggaatataatattttaaatttttagtgtaatcaagaaaaagatacattgttttatcaattgattaatttattggtcataggatttggcctatttatatttctgagtatccaacagaatcagtcccttaaaatgctgaatatcacaatttgcagttcggctaatacatttatatccattttattacttagttgtaatataaaggaagttacctcttcatatcccagggaaactatggtagttgacaaggagtgggtccaggctttataccaactgatgtcttatacaactcgaggagtcccttttaagagaaatggatacatcattggaatatgtattgaatgtggagattgaatatttatttaggatgtaaaactaaatcacaccagattataaaattaataaagctgacaaattctacaaggataacaaaatttataaaattaacttcattttcagaaaattaattgcttgatacatttctatgatttttttggctctgtagttttggttgcttattctctgattgcctcttcattttacatgattctattatgttttctatgttgagaataacaagataatgcagtcttttctctagtataattgattgtaatctgtcattttattaccgatagtttagaaaagttacatcaagtttctcaatttttgggggtgatttcatatacattcttaggactgtgaccaaacttgggaaatatctctatcaaatgtctttcatttgtgaactgtaagatttggaagaattttcaaagagcagttcctggctttatatgttttgaacattgtgtctccttcactccacacagacttgtggtgcctgaagctctgggcacattgattttggagtgatctctgggcttgcactttcatgttaccagcaccatggtaatcaggtgtgttcgtggaagctacacccagacagccagcaagaacctaagggtacagggaagagactgagaaccacaagaatataatcacaccaaactgaaactaaatgaatctttaactcagtttctaattagccagatcccaaaatggcccacagtcaccccagtgctaactaacccaagggaaaagtgtgatataggcaaaatcagtacgtagacattgatcttaaacttctgcagttaaaatgtctcactcatgcaaaattctaaaagcaaaggagcatgccatcccacccctcgagccttttccagtgccttaggaaggagcttgtgcaagtgaggggccctgaagcttcacccttcctagcctcacggtaaatccacctctgtggtagacagaaacatttctagaccacaggaaatctgtttgcctaaggaaacacagaagctgtccttacagttaaacagaaatagttctatttttttcctagagttcagcaccatttctcaaggggtatttcttagaagttcattttatgaagtctcctccacaagttctttttgatagccaataattcaaatgtcatgctacttctttaaatcactccagtcattgaatagcataatcttttcagggggcaaacagctgggctccagtaggctttaaatgttcatttgttttccaattttttgacttgcataggaagaagtaatccctttcatgtgaaatattcccctcgattaattttaaagaaccaatggcattgtctgataatgggatgaaagcccaattcactgaacagaatgtgctatttgtaacctggattatcctttaggtttttcggcatagtcctcgagaagctgagaatctgtcattttattgattaaaatacacgtacagatacacacgtttacattagaaataaaaatgttgtaagctcaaataggcagggtatttcacctgaaagcctgaaataaatgtgatgagaacctatgaactaagttccagtgtaaacaagtgggttaaattctcattatagaaacttccagtgagcaatgcagcatgactgtgggaccataattcaggaacaatctgcagagcaaaatatagaggcactaattttgttatatttgcagcccacatactgtaataccagatttgctcctgttgttctggccaaagatgagtcaggtacctctgatataaccattcctaaaagacaacaatggattcagaatgtgagactgagagaaatcctagaagtctgaccttcagatcagtttaactgtagatcaataatccattactcagaccaacacagtaccaaaaaatctcttcagctggctgccaaggtactattttatcttaaataagctggttgagagcagtcaatatagatacatttttcccactgacaatttgctgattcagagaacatgcaacatccagccacgaaatagataaagctcaggcctgccctgtagaatatggtcacctggctttcctgttctcctacaaatgtcctactggaagaatagcccttaatcccttaatgttcatctaaaccaaggcttgttctaaattctctagactctatctcatgcattattacatctctcttggcatacttctcttcttgaagtgcataacatttatataccttctacaaatgttggtattattgatattgagggagggggcagacccaggtctatggccttatgtattattagtgaattacaatttcttagagtaataggccaatgattaaagtcacatgttaggaaaactttaatccactagggaaaacttccaatatttttcaaagtaatttactacatttggatgcaaattatataggtgtttttggtggtatccatacttgctttcttgtcaacctgaagagatgtaaatgtaaatcgatgctaattgtaccgtgcttacacaaagagctaatttgagtaatatcctatcccatcagttcattttcaccatacatttttttctttacaaaattgtttttaaaactccactggaaaaaaatatataataaactacatgtaaattacacaatttagtaaattttgatataggtatacacatctgtgagaaaattaccaaaactgagatagtacacaaatatatatcacccccaaaagtttcctcgtgtctttgtcattccttcctccagctttttcccagaaatttcaccttcctcaggctgatcaacactcagctgaagactcaagagggggcctgtgcagatgtccctgagttccctctctgggccactgtctcctctcttttcagcaaattctagttaccttgacctccctgaattcccagctccatctcctcaacttagggagactttcaggtcaggcagtgatccctcctccttatgctgggacctggaagctctccagcatgtacactggggcaaccataggcgtcatctcattgtattcattttctctaatcaccatgctaagctaactgttgcctaaggtctgaaaactgttgtttcattcattttgtccagtttttccattctttcatgagcaagcataaacctgactcctttgggcaagaagcagaagtccctatagtgactttatttactttattgttattgtcagcatttggaaaaaaaaatgtagagattgactattttatactatttaagtaattttttgttatattgattttacctaaacaagagtttattagaagtattttgttatacagcttataacaaataattgtacaaaaattagaaaaatcagatgaacaaattttttataagacttctcgtggttatagaatgactctaacaccttgtagtgtattttttaggattttgttcttagtgcatgtgttagtctgttttcatgctgctgataaagacatacctgagactgggaagaaaaagaggtttaattggatttacagttccacatggccggggaggcctcagaatcatggtgggaggtgaaagacacttcttacatggtggcggcaagaaaaaatgaggaagatgcaaaagtggaaacccctgataaaaccatcagatcttgtgagacttattcaccaccacgagaatagtataggggaaacttcccccatgattcaaattatctcccaccgggtgtcccccacaacacatggaaattatgggagtataattcaagatgagatttgggtggggacacagagtcaaaccgtatcagtgtatatgtttagagggacatagaaaactatataagtttaataagaatatatacatattgttattaaatgaaaacatttgaaattataaaagtagtaaatattttttagtaaaattaaatatatatatagtaaaaagtgaaagctgttttacttccattcccagagaaaactttacttaaattttatatagttttttccagagttcttcctacacctgaaaaacacagtggattatttttgtgtacaaaagaaaagaaatcattctatatgtatctcctttacttccactctttttctttccacttaattcatacagataaactttaccatttaaatggcctctggtgattcctttataagaatgaaccattagatagttaaccagtttactaatgacagacatttatattgctcccaagttgttgccattgttcatttatttatttctttagtattaattcctagataagttgctacatcaaaaataatgtacatttaatattgcaatagttacaaggaaatctgtacttttttcagtaatatattagtgtctactttcaaaaagctttaaattctgagcatcatattgtcttctaaatctttgacaaaaattaatgtaaatgaatatgctattttaattgtcatttatttatttgattattagtaagatttagatttagatttcagtctttttattagccatttcagagggatgagcattctctgcctatggactttgcctggttttgtattgatgtgttcattgttttcttatttcctcatttgtaacatcattttaaagtgcttttatttctggacaatgtttttacattttttaagactcctattgtgatttttattaaaacaaagttagatytatagaaaagctggaaagaatttgaagttttaacgatattcgctctccctttccagaatatgtggcaaaggagggaaaagaagggattctgaaggaacacacgggaagtcggcagtgtgggagtgatggatatgttcattcccttgcttgtggtgatggtctcactggtgtatacatttgcagtaattgtcaagttgtacactttaaaatatgtgcagtttattttatctcagttacatctcaatgaaactttttttttaagtggcaccaaacatacattaaatagctttcagccaaaagtaaaaactgagtttggtcagaatatttttgtgctattttggttagatttcttctgtcacagttataatggctttctaaaataaaytaggaagccggagaaagtcactttaaccttcaagagtagggaaactgaacccataaaaaaagtgcttccaggtcagactcagcctaaaaaacctgaaaaataaatgtgacttctgagtagcagtatatgggaaaaattttctataaatctctgagaatgaagttgactggagactacacaagagacaaagagatatagaattgccttaaatctgaaccatggagttacagaatgataatggcattatgataaatttttagagaacactcttgataaacaggcacactcaaaaatagctttttgtttgttgttgttgttgtttgttttctgtgcaagaggtgacaattgaatgaggttccaaaaagtagtgtgggcttgcattgcacacatattatcaggcaggatttgtgcagtagagaaaggtgactgaagaatgtagtggaaggacatgctactggaagaagctgccaagtgacatacacagggctgtgagtcagccagggttgaggctctgtccagtgggacagcaggctctgtctccacagtggggactgcctgagagctgggtgctctggttcagccattgtagcacaaaggcacttgtataaatttccgtgaaatggcttgaaacctactttgccataagaatgagataaatttttaattcaaaacttaaaatatcttgattagaataaggaggaggaagagaaagaacaggcaataaaaagttatttattgattgattgacttaatgcagctagctgaagggtgagaggaagaactccggctccagagtctgaaagccagggctcaagtttcaatttgggcatttcccagctttgaacaacagaaaaacactgtttaccttttcagaacctcagtttccttagatctgtaaattagcaataaaaactaatgtgccttccaaggttatggtaaaaatcaaatatcttatgcctgtgtaaatctttttcaaaaaacaatagacactgcaaatattgggcattcttatgatgatgtttattcttcactgggagcattgatggattgattgttacttttcaataactttttccatatttgctctagttttaaatttgcaaattttaattcagtattgtttataataagacaaaagctcttctttaaggttggggcattaatgttaaaaaaaaaaaaagaactgttacatcaaatgtacatcaaatgcagtgactggacaacaaccaaagaaacttcctgtgtaatccccatcccatcacacacacacacacacacacacacacacacacacacacacacactatagacactatatttaaaattggcaggggtgatattatgaactcctgtaaaaccaaattgatttgtgtttgtcaggaatgtgtgggtctgtgtcctggaatgctatatatttccactgtgcactgcccattgaccatttctactaggatgccttgaaggcacctcagactcaacaagttcaatttgaaattcattatgtactccccagttgttcacgctaggagccttcaggccacccgtgacttttctctctccttgagtctctccttagcttcccatggatcagtctctgtaccatgttgattctaccttctgagtatcctttctgctctccctcatctgcacttctgttaccactgcctgagttttggttatgggcttcttagtcttttagtcttttctctcccccaacccagccatcgccaccagcaagaactatctttctaaagcaccaattatctttccaaaacagaagattttctcttctttgtaggaatttaactttagggcatagtcagataaattagccaaaatatatgtgaagaagctgttcatcacaatattgtttattatagtaaaaaaaggaaaaaaaccttaatatctcaaaaatggatcagtaatatcgagactatacacaatagtcattacattggtattatagatgtataataatttggaaatgatattataaaaaattattaaataatgtgcatagaaaaatttgtggaaaatgttttatgctataaaaatatttctaggtaatggaatttagtaagaatttttctcttcctacttcccaccaaacaaaagcaaaataaaactaaaatagaacaaaaattctgctatgtagccctttacaaaagatagtgcttctggcaagaaactgtgactgaccaaaatcctgcaattcagtacctgtgaaatgccatataacaaatttactcatatcctaaaagttatgagaactgggggcttcaggacatctcatacctgcctcattttttcaagaaaatttgttgtagaatcttttatataaaacactatacactgtccttaatccactatgtcctattccctctatttacaaatgtgctttgtccttacatttctttaaaaaaaaaacaacaaaaaactgtgttcacacgtatctttgtaggctaaagaaaagtgatactataaggattgggaggtagagggtgggggcactgaggaagccctgctgccctcaggttaagctccgtatctctctcatttaaggtccctgataggagttacttgttctcaaacatgtgtgttggctctttactgtcttttaagtagcatttatgatgaattccctttttttaatggtggtattacagtatctgatgttaggcatagaactgctcaggcagcaagtcaccttttctttttccccttttttgatagacttgagagaccaaggcagcacacacacactcctccaactagctttgcaatttgcatacatttcgattctggtggkctattcatcatttttatagaaatgcttttatgaaattcgatctcatggagtgagttaggagtttctttgttttttgctttatgataacccattgcctcagtaaatatcttaattattcccagaaaaaaataaacccaactgattagacctaatcccttctcaaatcactttactttctttgtcatttcctatccatcctctctctacactcagatgtctttgttttattatgaaatatatttggcatgagtaacaacattaagtaatatgaatcattttatttggttaaatgtctacactcaaagattagtggagaatttggaaaatataacgaaataatactggaacttttgatatttccctagctacttgccatattcaaaagatgtgtctttgaagtgaagagcagaatagtaccttattatagtccatattaaatcatatttatggctttcaacagaagtattgaaaaccagattcagttgctgcacccatcaactcatcatctacattaggtatttctccgaatgttatcccttcccttgmccccaaccccccgacaggccccagtgtgtgatgttcccctccctttgcccatatgttctcattgttcaactcccacttatgagtgagaacatgcggtgtttggttttcggttcctgtgttagtttgctaagaatgatggtttcaagcttcatccaagtccctgcaaaggacatgaactcatttttttttttttatgtctgcaaagtattccatggtgtatatgtgccacattttcttcatccagtctatcattgatgggtatttttgttggttccaagtctttgctattgtgaatagtcctgcaataaacatacacgtgcatgtgtctctatagtagaatgatttataatcctttgggattatatacccagtaatgggattgctgggtcaaatggtatttctacttctagatccttgagaaatcgccacactgtcttccacgatggttgaaccaatttacactcccaccaacagtgtaaaagcattcctatttctccacatcctttccagcatctattttttcctgactttttaatgatcgtcattctaactggtgtgagatggtatctcattgtagttttgatttgcatttctctaatgaccagtgatgatgagcttttttcatatgcttgttcatatgcataaatgtcttcttttgagaattgtctgtccatatccttcgtctgctttttgatggggttgtttgtttcttgtaaatttgtttaagttccttgtagattctggatattagacctttgtcagatggagactgcaaaacttttctctcattctctagcctgttcactctgatgatagtttcttttgctgtgcagaagctctttagtttagttagatcccatttgtcaattttggctttcgttgccattgcttttggtgttttagtcatgaactctttgcccatgcttatgtcctgaatggtattgcctaggttttcttctagggtttttatggttttaggtcttaagtttaagtctttaatccatcttgagttaatttttgtataaggtgtaaggaaggggtccagtttcagttttctgcatatggctagccagttttcccaacagcatttattaaatagggaatccattccccattgcttgtttttgtcaggtttgtcaaagatcagatggttgtagatgtgtggtgttgtttctgaggcctctgttctgttccattggtctatatacctgttttggtaccagtagcatgctgttgtggttactgtagccttatagtatagtttgaagtcaggtagcttgatgcttccagctttgttttttgtttgtttgtttgttttttcttttgcttaggattgtcttggcaatacgggctctcttttggttccatatgaaatttaaagtagttttttctaattctgtgaagaaagtcaatggtagcttgatgggaatagcattgaatctataaattactttggacagtgtggccattttcactatattgattcttcctatccatgagcatggaatgtttttccatttgtttgtgtcttctcttatttccttgggcagtggtttgtagttcaacttgaagaggtccttcacatcccttgtaagttgtattcgtaggtattttcttctytttgttgcaattgtgaatgggagtttgctcatgatttggctctctgtttgtctattatttgtgtataggaatgattgtgatttttgtacattgagtttttatcctgagactttgctgaagttgcttatcagcttaaggagtttttgggctgagacgatggggttttctaaatatacagtcatgtcatccgcaaagagagataatttaacatcctctcttcctatttgaatatattttatttctttctcttgcctgattgccctggccagaacttccaatactgtgttgaacaggagtggtgaaagagggcatccttgtcttgtgccagttttcaaagggaatacttccagcttttgcccattcagtatgttgttggctgtgggtttgtcataaatagctcttattatttcaagacatgttacatcaatacctattgagtgtttttagcatgaaggagtgttgaattttatcgaaggccttttctgcatctattgagttgatcatgtggtttttgtcattggtttcatttatgtgatgggttatgtttattgatttgcatatgttgaactagccttgcatcccagggatgaagccgacttgatcgtggtggataagctttttaatgcgttgctggatttggtttaccagtattttattgaggattttcacatcgatgttcatcaaggatatttggcctgagattttctttttttgttgtgtctctgccagcttttggtatcaggatgatgctggcctcataaaacgagttagggaggagtccctctttttctattgattggaatagtttcagaaggaacggtaccagctcctctttgtacctctggtagaatttggctgtgaattcatctggtcctgggctttttttggttggtaagttattaattactgcctcaatttcagaatttgttattggtctattcagggattccacttctttctggtttagtcttaggaaggtgtatgtgtccaggaatttatccatttcttctagattttctagtttatttgtgtagaggtgtttatagtattctctggtggtagtttgtatttctgtgggatcaatgatgatatcccctttatcattttttatttatkgtgtctatttgattcttctctcttttcttcttcattgatctggctagtggtctgttttgttaatcgtttcaaaaaaccagctcctggattcattgattttttcaaagggttttttctgtctctgtctccttcaattctgctctgatcttagttatttcttgccttctgctggcttttgaatgtgtttgcccttgcttctctagttcttttaattgtgatgttagggtgtcaattttagatctttcctgctttctcttgtgtgcatttagtgctataaatttccctctaaacactgctttagctgtgtcccagagattctggtacattgtatgtttgttcttattagtttcaaagaacttatttatttctgccttygtttcgttattcacccagtagtcattcaggagcaggttttttgattttccatgtagttgtgctgttttgagttagttcttaatcctgagttctaacttgattgcactgtggtctgagagactgtttgttatgatttctggttttttgcatttgctgaggagtgttttatttccaattatgtggtcaattttagaataagtgcaatgtggtgctgagaagaatgtatattctgttgatttgtggtggagagttctgtagatgtctattaggtccacttggtccagagcttagttcaagtcttgaatattcttgttaattttctgtctcgttcatctgtctgatattgacagtggggtgttaaagtctcccactagtattgtgtggaagtctaagtctctttgtaggtctctaggaacttgcattatgaatctgggtgctcttgtattgggtgcatatatatttcaggtagttagctcttcttgttgcattgaaccctttaccaatatgtaatgcccttctttgtctttttctrtcttttttggtttaaagtctgttttatcagagactaggattacaacaccttttttttttctttctgtttgtttggtaaatcttcctccatccctttatttttgagcctgtgtgtgtgtttgcacatgagatgagtctactraatacagcacattgatgggtcttgactctgtctagtttgccagcctgtgccatttaattggggcatttagctcatttacatttaaggttaatattgttatgtatgaatttgatcctgtcattatgatgctagctgtttattttgcccattagttgatgtagtttcttcatagtgtcagcggtctttacaatttaatatgtttttgcagtggctggtatcagtttttcctttccatatttagtgcttcctccaggagctcttgtaaggcaggcctggtggggacgaaatccctcaggatttgcttgtttgtaaaggattttgtttcttcttcaattatgaagcttagtttggctggatatgaaattctgggttgcaaattcttctctttaagaatgttgaatattggcccccactctcttctggcttgtagggtttctgcagagagatcagctgttagtctgatgggcttccctttgtgggtaacccaacctttctctctggctgcccttcacatgttttccttcatttcaaccttgatgaatctcacgattatgtgtcttggggttgctcttctcaaggagtatctttgtgaggttctctgtattttctgaatttgaatgttggcctgtcttgctaggttggggaagttctcctggaaaatatcctgaaaagtgttttccaacttggtttcattcttcccatctctttcaggtacactaatcacatgtaggtttggctttttacatagtcccatatttcttggaagcttttttcattccttttcattctttttttatctaatcttgtcttcatgctttatttcattaagttgatcttcaatctctgatatcctttcttccacttgatcagtttggctattgatactgtggtaagcttcacgatgttctcgtgctgtgttttttcaactccatcaggttatttatgttcttctctaaactggttattctagttagctattccactaaccttttatcaatgttcttagcttccttgcattaggttagaacatacttttttagcttggaggagtttgttattacccaccttctgaagcctatttctgtgaattgatctaactcattttctgtccagttttgttcccttgctggcgaggagttgtgatccttcggagaagaagaggcattctgttttttggaatttccatcctttttgcactggtttttcctcatcttcatggatttatctacctttgttctttgctgttggtgacctttagatggagtttttgtgtggtcatcttttttgttgatgttgatgctattgctttttgtttgttagttttccttctagcagtcagacccctcttctgcaggtttgctggaggtccactccacaccctgtttgcctgggtatcactagcagagcctgcagaacagcaaaaattgctccctgctccttcctctggaagcttcgtccaagaggggcacccaacagatgccagccagaactctcctgtatgaagtgtctgtcaacccctgctgggagtatctcccyatcgggaggcacaggggtcaggggccaacttgaggagggagtctgttccttagcagagcttaagggctgtgctgggaaatctgctgttctcttcagagctggcaggcaggaacatttaagtctgctgaagctgtgcccaaagccacccctccccccaggtgctctgtcccagggagatgggagttttatctgtaagcccctgactggggctgctacctttctttcagagataccctgctcagacaggaagaatctagagaggcagtctggctacagcaactttgtggagctgcggtgggctctgcccagtttgaacttcctggcagctttgtttacactgtgagggaaaaaccacctacttaagcctcagtaatggcggacacccctccccacaccaagctagagcatcccaggtcgacttcaggctgctatactggcagcaagaatttcaagccagtgtatcttagcttgctgggctctgtcagtgtgggattcactgagcaagaccccttggctccctggcttcagcccccttccaggggattgaatggctgtctcactggtgttccaggtgccattgggttatgaaaaaaaaactcctgcagctagctcaatgcctgcccaaacagccacccagttttgtgcttgaaacccagagcccttgtggtataggcacccaagagaatctcctgatctgtggctagtgaagaccgtgggaaaagcatagtatctgggctgggtagcttcgttcctcacggcacagtccctcatgacttcccttgggtagaggagggagttcccgagccccttgtgcttcccaggtggggagacgccccaccctgcttctgcttgccctctgtgggctgcacccactgtctaaccaggtccagtgagatgagctgggtacctcagttggaaatgctgaaatcacctgccttctgtgttgatctcactgggagctgcaggccggagctgtttctatttggccatctttattctcttacaattgaaaaataatgatcttaaaatttttgtctccacaaacaaaagcaagtaaattatctcagtaatatagttttaagaatagttgctcttttttaaytgttggcaggggcataagggataagagaagaaatagttaagaacacaggtgggttcaaatctactctctggcacttactagctggggaactttgggcaactcacctaaaccatttaagcactactagttgcctcttctggaagatggcagttgtaataatacataattgatagtgtcattatgagataaaatgacataatgcaaataaagttattggccatgtgcttggtacaaaataagtactcaaaaagtacttcaaagtaattttttattctaggagccattccttacaggtggaaaaattgtgccttttgcttacattttactttgcatttcacaagatgtcttcaagagtatgacctcattttatcccttccacaaatatgagacatagaaattgttagctacattttctagggaaaaaaaaccgagcgtcaggaatattaagtgactcagccaagggtctacacctcataattagcaggatcaagaccaatgaaagtgcctcttggtaagatcatacctgaagctaacagacacgtgcaggcctcctacaacataggtagccatgtttagtgtaggcagcagttggacttctgtatattcatttctggcactggagactgcttctattatagaagttgtgaccttgtcactcatcaagcagatggcattgcttgattagagtcaggccatatttagaacatttctataaagccattctcatttgggcaaacatttttgccaattgaagtgtttcttttcactaattgagcaaacaaatcatgggctatccactcacaagggctttccaccacccatattttcaggaaggcaggtgttgagcttatattttcagaatatatttccagcttcatacactcttaagagaacattgaagcctctttgatgaaggtgagggtctataaacatgcttgtattcattataaggggattgtgattgtcctcatagaaaaatgactttaagaaatagatgtatcctgaagcaagataatatgagtgtcaggctggacacgtaaaatacaagggaaggtagtggggaaaaggctgagaaaagagtactgtagactttacatcacaatgcttaaattaatctaaaatgtaagctataaaatagactaaaattatatatagacgtatgtgcgtatgtgtgcatatgcataaaagtgtatgtatctccatacttcaaaggctaatattcacagatagattcaacaatcaaatacggagttagttttgaaggaaaagccaaataagacacctttgctagactttaaaattttattttaactgaaactacggtatagacataaccatataaactaatctatttacttgtaaaattaattgtttcattgtcattgaatcagatgtgagtgtatttagataagtcaaggtagtaaaagagtataataagaaacactgagacccagggatcatgctaactcagacttctgtcttgagtctgccacataagagcaatatttcctcaggcaaattattttcatagttttgaacttgaaattctcatctgataaatggacacaccaatgcctaacacatagggtagctgtgaggattaaatgacatgcgcaatttgcatggcttcctcatcaagttgccacttgtattagtcggctagggctgctatagaaaataccacaagcttggtgccttaagcaacagaaatttattatctcaccgttctggaggctaggagtctgagatcaaggtgttggcagggttggttctttccgagggctgtgaggaaggatctgtttcaggtccttttcttagcttgtagatggccttctctctgtattttctcttcgtcttctctctgtacatgtctctgtgtccacatttcccttcatgtctctgtgtccaaatttctctttgtcttctctctgtacatgtctctgtgtccaaatttcccttttattacaaggacaccagtcacattgaagtagggtgcatcttactcctatatgacctcatcttaactaataacatctgcaaaaaccctatttccaatagggtcccattctagggtactgagaggttaggcttcaacattaattttgatagggggacacagtacaacccataacaacactcagaagtcactttctcagacagaccatgcttgaccactgatgtagtttggctgtgtccccaccaaaatatcctgaattgtagttcccataatccgcacgtgtagtgggagggaccaagtgggaggtaattgaatcatggtggcagttacactcatgctgttctcrtgatagtgagtgagttctcatgagatctgatggttttttaaggggctttcccttttttgtttggcacttctccttgctgctgctatgtgaagaaggacatgttagcttccccttccaccatggttgtaagtttcctgaggcttccccagccatgctgaactgtgagtcaattaaacctctttccattataaatcacccagtgtcaggtatgtctttattagtgggatgagaacggactaatacaactaccttttctaagaacagtcttaccctttcctagcacacacagtcccttgccctatataatatgccaaagtaaatcatagaatcatttattttcttattctttttctatcccccacactagtctgaagtccatggtgccagggccctacttgtcttggaggttgttctattctgggcttggagaacagtgcctggtacaaaatagatccttaacctctggcttgaggttagggctcaataagtaataggtggtataagtatctaaaaaagaatctcattctctatccaaattggtattcactagccatatgtgaaagaaactaaattttcaattttattttaataaatctaaatttaaatatccattagtggctattatattggacagcacagatatagaacatttctgctactgcaggaagttctatgggacatttctagacatagaagcatagatgaggatataatagtgataattcagttcagacccggtgctgcctgccaaattccacaacactgccctgcattgctgccctctcatgacaccacacagctcccagttgatttgttcttctttatggtaccaggtgtattgggtgtattgcaagcattttcttcttccattattaagttaaaaataccccttgaagttttgaaaagctgtaaaggggttgtcttgagagtcccattaacatttatagtgaattctgtggcagcaattttttattttaattgttgttgtctttgctattcagataagtaagcagtaggcatrgataattaatgtacagattctgttttacacaactttaagaatgactctttgagaaacatgtctttaaggacaatgaactgagatatcccttacttgaggataaaatatgggtgcaggtacaaggagtcagcaggtgtcacgtgtgggctcatttcttccctcaaccctggaaagtatatagattctcaccatccttgttcagcctctgccttagggataagcagtgctggggtgattttatgctcagraagtaaccaaaggctagcaaacatctctcattgttggcagtaaaaaccattgctatgaataacaatctatattttataaaactattttggcttcacataaaaatctgatgcttcaaggaacatactccaatgtgccttgaagtatagcacatactccaatgtgttactgaatcctgaaccacacccctaaaggaggcattcattgatatcactggcttaacaaaaggctttggggtggggtgaagggataatacataatgcagttagaaagtgatagaaagcatattgcttatataaaattcagtgctaggtaagaataaaatatgaaatacatgtggcaatgaacttagaatatgctccagttttggaaaaagaatagtaagataaaaccctagaatttggaacatttttaaataacctctattactatcattttaatctttgaacagtgacaaaatatcccacctgctttgtgacttttctgaaaagaatacatggtcacagggtattctctattggaataccattcacaccttcaaacttatcaccatccagttaaatttgaggaatggtaattgatgaccttaagtgagtcaagtcacaattacctgaagaactaaaaatgctactggaaggactagactctaagttggtacctaactaattcttattgcctgaatgtggttgtagagtagacccttcattaggaagtgaataggggaagtatgaaaaattaaatgtgtacaaaatccaaagcttcctgataggtcttttgggctattttgaagaataagacaaacaacagaagcattataattggaggattatagagccaacaaaggcaaagtaggagcatatttatcagacataataaagacagaaattaaagatcttatttatgtttgaggcataggaagcaatagaagcatatatatttgcaaggtctagacatgcctctattcatcaatgcattttagtattttagctcagcgttcattaaagttattaccttaatttatttaatcaaaatattgactctattctcatactgcaaataacttgttacatgatttggatgttaatatgatttttttaccactgaaagttaaactaatgctcatcctttcactattaaaatattaatgtcttctattttagtttagcatttaaaaaacaaatttgtagagatgggatctcactgttataaaaaagctttccatttttgtaaactgcaaacttgcagttagcttaactaaaattacataatagaatttccaaattaagaaattaagtcactcatttgttctgtaaagcagtcacccttgaataaagaaatscatggttcaacatattttttaagaattcaatagtactttcagctttattgggatataactgacaaattgaaattgtatatattttcagtgaacaacttgatgttttgatatacacataaactttatgaaatgaccattaccatggttccatataaccattgtgtttaaaccatctaattctcttgttgactttcatttaaatgtttgatgtatagaaacctcatttcattaaatacttcagaggccaactgttattttatagaatccaacaaacattactttaatgttaacggaccctaaaatggaaaccaggcattggttttttttattttgttttgttttgtttttttgagacggagtctcactctttcacccaggctggagtacagtggcacaatctgggctcactgcaagctccgcctcctgggttcatgccattctcctgcctcagccacccaagtagctgggactacaggcgcccgccaccacgcctggccaattttttgtatttttgtttttttagtagagacggggtttcaccgtgttagctaggatggtctcaatctcctgatcttgtgatccrcccgcctcagcctcccaaagtgctgggattacaggcatgagccaccgcgcccagtcattggtttgtaatgccataaagaatccatgaataatatagtcgtgtatttatttttgaaagagaatgttcttttaataaagcatatgttttctaatttacacttgagcaaacctttattttaaagaaaaattgagaaatttatgtttcagagttatgagacaccgtcttcttatctaagatatgaaggatgcagcaataaattatccagatgttttggctatagtctttttttattgttgagtaacaaatttccatacacttagcaacttaaaacaatatccttttttttttttaatgtcgcagctctttaggtcagaaattcaggataacagggctggtttatgtgctcagagtctcaaactcaaggctgaaattaaggtgctaaccagctgtgatcttatctggaatcaaggtcatctctcaagatcattactgccactgttggaagaattcagtttcttgcaattataggatagaaatccctcttcttttgctagctgttggctgtagccccctgtgaccttctagaggccactcttggattcttatcccattggtcatcttcatctcagccgtggaagacctcccctctcacacttcatctctctgacttccttttttgcttctagctaaagaaagcactctgcttttataggttttataggactcatgtgattagattagacccaccctgataatcttatcttaaggtcagctgattagtaaccttaattgcatctacaaaaattcctttttccatgtaaagtaatataaccgtggagtaacaccagggctgagggtaataggagtcatcttagaattgtgtattagccaagatgtggaattcctatcaataaatttaagcagtgtttccattatatttgaaaaggagagaagattagggtggctgatcatcttgtatttaaatgctaagaaagacaataatcacagccaaraagcttggtcacatgttgactttttaggaactcaattatagcaatcagaattgatagaggcagaaatcatactgcaaaggcttaaaggaatgctaagagttctaccatttgagaaataaagaactaccaggcaaaatgaagaaataaccatgtaattgaaaaactgccagaaataattcttaattagatgtagaccaaatgtctcaatagttggataacaaggcagaggccacataattcctctgtgcatcagtctgctcagacattctcatccattgcagattaaagccgagtactaccacgtttgtgccacagcgtctctgtggcctcctccctgatggctgcctgggaacatgttcctcactgcatcacactgcccttcccagtctctcaggaagcttaaaggggtaaagcaaagggaggagactgaaaaaaaaatgacaaattcgggagaagatcttttaactttctgttcattaagtgagaatttgtagatagagtggaaagaaccattgtgatcaggggcaggagtatgtgaaggaaaggagggatagactgaagatgtcagagacagagaaggccccaaaggatggaacaggggatggaattaggagaaacgtcctgaaggatagaatggggatagaattaagagcgtgcatggatccatttagtctggaaagtgaaaatcttatttttctgaaatacaggaaaagaacagaaaatgagtagtggtttcaaatgagggagaaaaagcaattacatgtaagaaggcttctatcctctcaacacaacggggctgctttatatatattttctcttctgtaaagtgataaaaaatagtaaggccaaataatatttatgatagttaactgatatgatgcatataaactgcttagagtagcatataccacattataaatgcacagaaatgttagctattttttactatcattgccattattattttctattgacagtaaaggaaagtgaggtaatgttgtgaatttaaaagtaacataaagcttttcaatcacttgttaaaaatagcattgcagagaaacattgaaccctccttaaatgtaaatagcacgattcatygaacatctagtcaagatgactaatctttttttctagtaacgctcaacagtctagaaggtacagaaggcggtgggtatcaaggtttataaaaggtcaggaattggaactctggggacctggttgttctcatgagggcacataccaagatcagggtgagctaggaagtttaagtgataggaagataatagatttatttagagaggggaaattgagacagtttcaagcctcggagatggaacagaacaacagagctccaagcactgggatgcagggctggaggtgaccaagtccacgactttgtctttctaaagtgaagtggaggtgagtctgaagaaattatcactgtgattaaggttgttattgagggcaacagggcaagctagcttaggaagaaaaagtttggcctaggtrtaagatgtagttgtctaatattgaacagcacagattttagaacattagcatcaccacagaaaattcgattgaacagcactgtactagaggtacaggaaagtgagagggtagggtcttacagaaaatgttggagcagaagaaactatgccaaatgaggatgtgagcaaggatattctgtatttttgacaattttgaagcattatttattattttaacgtttctgaaatttggatgagtcatgcaattgatgtgctcatttaataaggttagtgtttatttttgtcctgaaaaaccattaagcaattaataatgcatctcacaatcagtgtcatcataatatcaatgaaatatggtaagagcaaggccaaaggaagggttttcttactgggtggtgatcacaacgataaagaatcaggacaaaaagactgaagagatgtggtgataatgggatatgagctgagttggaaaagaactagccccaagatattagtcagcactttggaggggtgatgaatttgccatggtttaaagtacttctttgagtttacagcacccgactctgtgttctcagaccttatgttgtttgagaattgggctgatggtgagtgtcaggagaatgatgtcagtcattctaaaatagtctcccaggtgctgatgcgctttggcaactacagtaggtcttccttaagattgggcatggaagagacaaatgtcggagaaaaatacccctcttgttttgagtggagaaaatcagaagaaagggagagagatcggggtgtgccgaaagcaaagccaatgtgatcatcaagataataatagccatacattaaggtagtcaagatcatagacttgagatctgaacttggatggagatgatgaactacacagttttagtctcatcaaaaagtcagctacatcagatggaactgaagttgtttgttttgttttactttttgatgctgtaataactctggcatgacttttcacagcaaattagaattaagaccttttaaatttgtcccaaatggttattgatacctgcaataatacttttccccctggaattatattttcctcttaaaatatatgtgtgtatgcatacattcgtatatatagtgtgtgggtatgtgtttgtgtgcatatgtgtgtgcatatatatatataaagaaaatagtgtagcggaaagaactctgttttctaagtcaaaatatctgattttgaacttggggtccagtgagccacttaatttcaggtttaacttctggcaagttttatcttctgaagccagaagtcattttcttttaaaaagaggcaatacttgtaactcttttaaagatcagatgacataaaagatatgaaaatataaactataacgtataaatatactgaactgtaaagtcatacaaatttaagtcattaatgttactgattggagttcatttctcagatttcacatagttgttgggcacagaaaatttggaaactttggctttcattcttgcacagactaatttagcatcatattcttgttctttgctgatttatcaggtaaggaaaaagtcaagtaaaatgatttggatgcctcactgccagggaatgcttgataaattaaaagcctggcttcctagggacattctgactactgttgtttataaccaagatcttttgcaaccttagacttcccaggaaaagcctgggctttgttgctgcaggaaggagaacagggaggaaaatatctttcagatttaatcagtgagaaactactaggaattagccactatgctagggaatacccaatcattattttgatacttttgtaagctgaagcatcatttaggggcctagcaggtttgctttctgatcatattcaaagccttcacctgggtgaactcctgtgagaacctataattcagggatgctaaagtcaccatggtgacaagaagaactcagctggcttcctattcaatgcatctcagatgaaggtgctcactccaggaaacataaaggatatccattaatttttagctttttttgtgtgaagcaaagggtattgctaatatacaacctctggaatagacctgatcagttacccagtctctggaagagggtggtaattgaaaaactaataagggcaggccctagtctaagaaactaaatctaagacagccacctgaagtgtgaagatggaaattgcagagttgagtctggagtgttttataggcttatagctctaacttgcctaattgaacttttacaattgaacttttacaaagaaagtggggatttatttatactcctactctagggggccacaaaaaaaaaagaggaaatgagagtataggagatttctctaggttatcataagaaagaagtctgacaatacaatccttgttccatttatctttttataataaaccacaaaatatttaagagctgttggaattctttgtttcttccccatgctggctattttgccattctcttcatctcaatactttgctgagtaaaagtcttgaaaccaaaaatatccctacaattcatgaccttgagtgacttcaaaattcagttagacaaaacagacagctgagttctgtggttctcaatctttgtacttttaaaagtattcatgctttggttctacccacaaagatcctgatttcactggggctgaagtgttgaaagattttatagccaccaaatcaccctaatgtgcaatcaagggtgagaaccttattttctcatatcccccttccttatatccactgatcttgacttcagttttaccttggcaattcacctccatggccacactctgaactttgtcatcagccagaactgctccaaccaacctcaaaatcttaaactcaaatatcccacactctaagcatagttttctttctttctagctcctcttattacgttaaagacctaatagtcttatttctcaactgctttcttgctaacccttcattgttctcctcataaacccaaacaggagataacaagccaggattaatccacctgtgtgatctccccatttttaacccttgtgtttccagagaaaaacacaaccacttacactggtgccacagcaagttcatactctccagacccaattggatggagcctcaatactgccaaaatcccattcatttctctagtcagccttgtgtccttttttcccaataaaaactctgtctcttggtcacatggacatttccatcctatttctgtttgaggtagaaatctgctcctgtaccttgagtcccacctgcttctgccttttcagttgacttgctccttcacctgccacttgtcttggatcaccagctttagccatggactaagtctttaacatgggyatttaaacatacttaaaacacttccttcaaaaagcaaagcataacagtgctaaagcaaattttcatgggtcctcctctgcctactgccttcctccctctaacagccaaataattttgcatctactctcaattttgcactttcctacaccaaatatactgacatttttagtgctaaatccaggaaattttttcttagtctttgttttactcagattctcttcagtatttgaagagtgtaggccactctctgtgcataaaacagtctattcctccatgggctcctagctaacagcctgcagtttgtcagttttctttggggtttcttgatcctctgcctaccactgaaatggcagtgttctttygtcagcactttctgctgttaccccatattccagaggtatttagccatggctatgcatcagaatcacctgcaaagccttttaaaatgcagccatccgcttgctatgctcgatcatctgaatcagaattactagggattggggcccaggcacctaagttattcagaaattccacagatgattgtgatatgctggtggtcttcttcacatccatgccttctcaggcattccctttatcagtctttcatctggatatcctagaccctaggcttatattttagatatgtctgcacaagatgtccaaactcactgatgtgtccaagagagcctccttgcctccattcccttcccatctcatccaatctgctctaccacctcccccttttctcctcccccatatttcagtctgaatgagtgacatcagattttattaaattgtacaagccagaaacttgataatcattttgaattgttttatttatccctcatgtccaatcaattgtcaagttatatcagtttcacctctagtattctccaaagttttttatatacatgggtattactttaggttaagctaagtcagtctgtgttgctataacaaaatacctaaaactgggtaatttataatgaacagaaactcatttcttacagtctggaagctggaaagtccaatatcaacgtgccagcatcttgcgagggctttcttgttgtgacatcatatggcggaaagtgagagggcaggagagagcaagaagggactgaacttgcccttataagggcaccaatgcctcccatgagggtggagccctcatgacctaattacctcttaaaggtcccacctcttaatactgttacaatgactattaaatttcaatatgagttttggaaggggagaaacattcaaaccatagcagccaccatcatctgtcttctgaaatattaccaccacctcctgactgtatcctctgtgtttggctttgcttactcccactaatctgtttttcacacaatgctcagaacatttttttctagaggataaatatgataatatatatttcctgcttaagacttttcagtgactatctgttgctttcagaatagaggccaagctgtaacatggcatatatggcccatcagaacccgacgcctgttctgttcttttgtcaggtcctctctttcattctgcacacagttttcatcacaattctctggcgttcatgattctctcttgtctctgagcctttgtttctttgctgtttttgcctagaacaccctcttcctcttggctcaggtcttacatcttccattcctgtcaaggtaactcctcctcatgttccagctcatatctgatatatcatcttttaaaaggatgtctgcctaaacctgtagaatgggcttaagagggcttcctgtttattctcatactgtgtacaatgaaaatctactcattgatttacttctctctcccacccaactttatgttcctttaacatagaaacttttaggcatcgaagaattcttttttttacatgacacataaactctcaatgattgttgaaggaatgaaatgaggagtattcagaactgttagtaaaaaaaaaaatcrgaaaataatgatcaagagaggctttataaagggaaagtcagtagttgaaaagctagaagtagaatgagctgactgacttgaaaagaggccactacttagtgaaaagcacttcattggtatggtaggagttgaagtcagaatgcagaaaattgaggaatgagtggtgtatgagttttctgctgaaacaaagtactagaaacagagtggtttaaacagaaatgtgttgtctcacagttatggaggtgagaattctacgatcgaggtgttggcagggccatgctccctgtaaaggagctagggaaggaactgttccagttctctcttgtagcttctggtagttcctttgcttgtagcagcatccatccagtcttcacatagtgttccttctgtgtacgtgtttgtctcttcacatggtgttctttttataaaggcgtgaggcacactggattagggacctactctcttgcaatatgtcctcatcttcacttaatgaatcatacctgcaacaatcctatttccagtaaggtcacattctcacgtacgaggagttaggacttcaacacatgatttctgggggagacgcaataaagtgttggacttgggtttattcgtggtgctattattgtcatacattcatagatcaatattagcttttaatctcttattttagagtccacattgtagcataatatttactgtggttgccatggaagagaagttagtaaatgactttcactatacagggctaccacactggtttccaaattgagctcttcaaggttgaagatggaggacgatggagctcctccaccacagcaccctctctttgcctaatttacccataagcaaagcaaggtttgaaatccacctatctaaaataagacttttagacatgttggaggatatatttttagtcataatgttgatagcaaataagaagagaagatacaccctcagcaattggagacaagaaaatctgatgcataatttaaaagaagaaaacgacaaaaagtacgaaatcttatgtgcacttattacctaatactttaaaatcttggagatatatatatatatatatatatatatatgtaattattaggtctaagtaatacacaaagttaaacccttcactatcttagttggaatacgtatagaggtatagatatatatagatatcctttcccacacttattttagctcttgaaatgcatagaataggaaaaaaatcagaattataatctccatgggagcaactttataccaaaaaacacagaagcaattatatttgaaacctgctagagtacaaaattctagattatctttagcagtttacttttattttcatggataaaatttgaaaagacaagggccagtgactcattctaccatttgagagcatcgctagggagcatgacattatcacagagacagatatatggtgacttggaaattttttgtaggtaattcctattcttaaacttaatatgagttgccaatttggaacactgctacattatatttatcacagagttataacttttaatggtttgagggatcatagatctgaccacatcaatatttggctcattttcaaaatagaaagtgctgaaacaccaaaatactgagctgaattctttaaaactttaaagctgaaaaaccactcatgtacataaagtgaaataagaatcaacctagtgtaaatggctgcatttttgaaattccattgtaaatcttaataaaaaatattgttttaaaaagccagcatgtttggaaatgggtgtaatttgcattaaaatcagatgagattatttcttggttttactactaagacacatggacacaggaaggggaacatcacacaccagggcctgttgtggggtgggggaaggggggagggatagcattaggagatatacctagtgttaaatgacgagttaatgggtgcagcacaccaacatggcacatgtatacatatgtaactaacctgcacattgtgcacatgtaccctaaaacttaaagtataattgaaaaaaaaaaagacagattgtggatgcttatggaaaatacgtttactttttctagactcctagaaggccattttgaggacttctgtaataattcactaaatagatagaaaactgcctagacctatacttcgctgtaagatagtcctcttttggtctaaccctcatttctatttagctaactagctagtcaggagtgtaaggtaggcagtataaagaattttaaacttactagggtcacattcaaagtaagcctagagtaaaatcaggagatcagattaccccagctactgagactgaaatgtgaactgtattgttgaagagcttttcttcctcacaattgaagaagacataaagactggtgatataagagcaaatgcagacacttttggtcactgttagcttgttttgaatgtgctgactgtgtctgtgtccatcttgaaaatattgaggagtcagcaaaacatatttgactctttacccactttttcttaaatgtttcatagtcatgagtatttcgtgggggaatttaatctatgtgcctatgattcatttacactagtctcatcaaaatggcatagggagatattgaatggctaagaatccttaaagtttaagaggccatttaaggcttttatctctgaaccagaaagtcatagtgtaccaggactactcccaattcaaacataccagggttcaattttgttttgtctaatatatcccaggaaaccttactgtttgattcatgatttctaacctcaaaatgctggtctaacatatgtatatatatattaatgaagtccaggtaagaagcgcatggctagaatgggaatgttcaacataaaaatatcccagccaggcgtggtggctcatgcctgtaatcccagcagtttgggaggtcgaggcctgcagatcgcttgagctcaagagtttgagaccagcctgagcaacatggcaaaaccctgtctctacaaaaaatacaaaaattagctgggtgtggtagtgcgtgcctgtagtctcagctactcaggaggctgaggcctgagaattgcttgagcctgagaggtggaggttgcagaaccgagactgtgccactgcactcaggtctagatgatagagagagaccctaccaccaaaaaaaaaaaaaaatgaaagccacattttgaataactaaatttgaatatcagcacagttgcctgaggatgtatcaatttacagataaatgccttcctaccaactgaagaataactagtgctttaaaacttttcatccattaaaggaaagtcacactgaattactccgttggtgttgtgcgatattctatagtttttaaaatgctttaaaatacataatcttgtctgattaggtaaacaggattggtattctctccatttctaaaaggggaaaatacaattacatagaagtttgtatattgttgctttatgtgtagtaacatagactcttacagttctgagctatgattgtatgcaataatagaagcaatgctgcacatatctcatatagctctattttatttttaaattcacttttctcatacttgtaagaaatctttgactttggttttagttaaaagataaaacaaaatcataatttctatgataatacaaagcttgaatattatcattggcataaaattcagttctaatttttctccaaaataagatgcttactccaatataattatcttccttcttaattttacatatttgcattttaaagtggcctattcctatggggctaatgtcagagcagagtgttctttgaactcaatgtgtgctccccagtcaggtcaagtccagtcagggcagtgactaagaaatgggtcagaacttacttaaattatgcagttgcctggaaaaaagttcaacttatataatatatgggaatatgtgaatggagaatggcttcccccttaatgtgtaaactgtaactcaaaatatttttttgagttatagaaaaatttttttgtaaaaaaattaagaaaaaagttttttttaaaaattgagccaaatattaagataatcttcatggtgaagcattactaaattaatttaacggcagtcttaatgtaatgtaattttggtttactgatatgtaatcagttaatcttgaagatttcataagttctggcatttgttctttcctcttgtttctctcttataaattggtcaattctccaaaatatgcaaattaaatttaatgttaacctatgtgtaagtcaaggcatgtgaatcccatgaccaaataaatattacaaagcaggtgtctctacactgatgctgaatacctaccatttagagaagacaactctcttccccagggtctcaaggcatctcattcccctggctttcccccttttcccttgaggactctgcatcctcctttgctgcatcctcctcagctttccaaagtcttagcatggacatgtcccaagcttagtccttgcagtcttctgtcctccttctgcgtatctcttacacctcatctaatcacaagacttcaaagtctatatgccattgtttgtcaagtctctaccgatctggatctctcacctgatacagactttcatattcaactgccttcctgtcatttccaccatgatgtctcctctatacctgaaactgagcatgtccaaaaccaaagtattgctctttcccagcaaacttgctcctcctggagccttcctgatctcagaccaaactttgttgttgtctttgactctttttttcctcacactcccaattccaatccaatcagcaaatccagccagcattctttcaaaatataacccagaatttgcccatttctcaccatcaccatggcaaccagcttggttccggccaccaactttcccacctgtgttgctgcaccacctcctgaccagtgtccctgcttcagcctgttttgcacccctcagcagagtgaggctgctccagtctaggtggcattaggtcacttctttgctcagaatacttcagtaacttctgattttcctcaaaatgaaattgaaggtctttataataatctactattttttcctgtggcctctcagattcagctcctactcctcctcctctggtccagtcactctggtctccttccattcccacaactatccaagcaaagtcctgcttcaggtacttcatgttctcaagtccttcagccagaacttgcatcagcctgatatgccattgttttctttcctcacctctttccatcctttatttggatatcttcagagtgaggctatccttttattttgtttttaataattatatcttcaccatgcctgttcctggcattccccatcccctcttctttttaaattgttctccctgcaaactgttatcatataatccttatatagatttcactttttctttttgtttatttttcatctctcctaccacgactcaagagccctagttatttcatagttcactgctatatccctggcctttagagttgttcttagcatatggtggcagtcaataaaaatttgttgaatagataaataattactgtctatcttcctctccttaggtagaagcaggctatataaaatataaattattggattgtcagacttgcccatatttatattcaaatacgataatccaacttggttgttggaatctgtaaaaaaaaaaattagaacatccatttttaaaagattgaacaagcagtaatttttttccaaatctaaaacaaacaaacaaacaaaaaaaaaaacagtgtcaatcaaggaatcagaatatatattgaattaattgtttttaggtcattagtgaacttgactgtgctgttgctctcaaagcactaaaaatagctgatatcaaaccaaaggtccttcatgatccttgaaacttccttgcagttctaaagaaaaactcaagcttataggaagaagttttaatgagacattgtgctgttcaggagagacaaaatcatagtttctgacctcaggggcattgataaaataagagagcagaagctctagggaaattagtttttaggaagtggaatccggtggctcattgcacattctaaatagcatcagagtaagaatgacagtctggctgattggctttagtgatgtggatagatttggctgctatattatcaaaactggattgaaatccctcaatatcaatgaagttttacaaaggtataaggactactgggccacagttcattctaggacttcatttaagtgacaaagtaaggtgggccaaagtgagattgggacaataagctaagtaatcttaaatttgttcttgtgtctatcctgatttgatcaatccacaaatattaatatttatggaacatttactgtgtaccaggcactgtgctagggagattgtgtaacagtgaccacagcagatgtaaaccctgcccttaagaagtttgtatcctagtgtggagacgggcattcagacagataaatgaatatacaagtgcaggttgtgatgagtgttacaaggggaaatacaagggtgctaggggagagaacatgagccatatgggttaaaccagggctatcatctgactgcttgtgtcctcccaaaattcttgttttgaaatcctcacccccaatatcatggtattaggaagtggggctttgggaggtcattaagtcatgagggcagggttcttacaaatgggattagtgcccttatgaaagaagcctagatccttttccccttgagccttgtgagcttgcagtgaatagatagttgtccatcaacaaggaagtaaaccatcaccagatatccaatctgctgatgccttcatcttggacttcttagcttctaggactgtcagcaataaatttctgctatttctaatctactcaggtattttgttatagcagcctgaatggactaagacaaccaggttgtcattaaaatctaccctgaaggttcagtacgaatccatgatgtatttgaataagatttgtatgtgaatcctctgtaaggacatccagatttgtggtctagatcccatttcttcccactttctaagagaccttgtacccctagcccctgtttctttctgccagcattttctgtttttctccactgactccttaccttctgccattatcaagttttacctattttgaaatataaatatcacatttaattattctccatagccttacagacttcatgtcttcaccactcaaaacctcatgtagtctccttttccccctcgtttacttattgtttcattgaggtgtatttcaatgggtttgaggcatgatcccatccaaaggactaatgtgcatatactcaaaatgttaattcagctgaactgctcacatctttgcttcattgcccatgtctttttgcactgaattgtaagccactaagctttgaatcaatgaacattttaaaatgttatttgtatagtgtctaaaaacatgtggcagttgagaatagattaatctgttctagaccaaaataagatcctggtgaagaggattttaaattcttgagttgaaagctgatcaaggtggaaccatataatgccacatgatacagtgtgatgtcagatagattattgtaacaaacacataattaattagtaatgaagtaatagggttttagatgtttaatcttcaagctggtagatataaattaggtcacattaaaatcagttctccagtctcaatagctctatgctcatattctccagcataaacctcagtaactcacacaacctctttcacttagcatctctgagactctggggggtgccttgcaattgcccctgcatggatctgcccaggatgtcactttgtactggtctctgctctaccagtgaccttgacccatgttcattagtctcttgattgcctaacggcagacaccaaccagtttgttccagctatgaatgttctctgttgtatctagggcagtaccagaacactattcacctgcagagtagaaaggagagtacatctcccttcttgctctctcaggggaagccaacagctgtgctgcttctggagctctcaaattctaggaatctagtgaaaaaagttctttcagttctccacacaactctttgtatttccgggatatgattaggagagttcatatgccagtcaccacaatctgccaagaaccactacacctttcaggaagctcagagtttgtggctgaggttcgggttattcataccagattccttttttctgtagagtgaattcttagtcagagacccattttctgttttagtgagaatgggctacaggaacaacaccaaaagctcagttgcttagaagagtagaggcttatttctcactcaagctacatgttcatgacaggtttgtggtggagggagagggttctgctcttcacttaggaacacagttaatgggagacaccacagtcgggaaagttcccagtcattgtggcagaagacagggcacttcatacacagacctcagtggtttcccccagaagtgacacgtattgcttctgctcacatatcttttttcttttttgtcttgtttcatcaaatcatagtgatattcagattaactacatatatatatgtgtgtgtgtgtgtgtgtgtgtacatatacaaattagagagatatacgtgtttctcatgctgctcacattttatttgccaaagtaaggttaccatgcctaacttcaaaggggcaagaaagtgcaatcttgccatgtgccttaaagagggagaactgagaatggtgacgaatagcaccaatgatgagtacaccttcttccttgaagttttgcatctatatccttctacttcccatccaatcctgccttttatgacatatctctctacatatgatcttcaatcatgtaaattgctcagtatttctctatattaattagtggttctggctaagggtctctcacgagttgttggcttgggctacagtcatctcaaggctcagctgcttcctcagtgactcatatagttgttggaaagcctcaactccttgccatgtgggcctctctatagggctaaccacagtattatagcttgtatcccccagagtgagagatgagagagacagataggcagacagagacggagacaaaagacagagacatcccaagacagaagtcaaacacagtctttcataatctcttcttgaaagtgacatgtcatcactgctgtctgataaccaatcctgggatagagtgggagggggactctacaaagatgtatgttaaatgccaggaggtgggagacttcatggaagctggctgccactctcattcaagaaggctacttactcttatgtaaatcttggctgccaaaaattgctgtctaaatcatagcttcttccaagtagcatacccaggacagggtaaatgcaatttaaaacttctctcaagggggttacttcatttagactagtgttggtgttctcctatgcaattaaatggttcttgtgtcttatcattttcaatgtccaatatccaaggaaatacatgcactcatccacagaatattttctttatttttaaagttttaatgctgtttttaagtcccttgtgtttaggtggttgttatacttgaaatgttagcagacataatacacagcaaataaattcttgatggttttgcttatcctcttctctagaagcatgcgctgtgtgagctaagtgtgactttaaataggacatagggaggaattagaaatagaggcaaagtggcagaaaccccacattaaaatccatccttgtcagcactctctgatttcacataccagggttcttttcggattaatcaaaaaattgttgaaacgtgttaaaggagaaatgcaattctgtaaggggaacacagttcctatttggagggaaggaatatgtatggccactataataacaaattaggggaaggcatgtgtgaatttttatgcactcatcgtcctattgagcacaagtagagaggtttattttcttttcttcattaattgttcttacagaaataaaccacactgtgtaggaaactaggcactcttccctacctactcctgctattgaaagagccttatctatggaaatcctcaaatcagcttcttcttattgtaccagtgatgtctcttggattaattcagacaaactgtgcagtgtaaccaatgcagacagtatgttagaagcgcatggatagcttgcttccttttcattccttcttccttcctttattgtttccgcattgtggttccttgtatcctaccatcttgaatctcttgtacctctaattatagtatgctcactatatgcaaggtttctcctcccacctaccccctgctgcctcctctactgacatctcacttcattcccaagaaaaacattgccctcccctccaagctcactgtgtttgcatttctctgctcttttccgctctcctccttggcatgctggtttaatcaattttaccaaatgactttcctggcagctgtaaaaagaaaaccccagagcaagttaatagcaatctaatactgcactttctgtcatttctctaaaacgtacagaactatttggtcattggattgatttttaatgatctaaatgatcagatgtttcaacgctgcactgcagcagcctgataataaataggaaaggggaggggcatggatgctgggcactcagtcagtgctagatgaataatcctaaaacagcagccaaggagacaagataaaatgtcagcctttgccaaatcatatattagcatttttaaacaaagacacctctttattttgattttgcatatggggaactaaaacaaaatgtttttgatgagggtttaggaagtcatcaatagggttaggaatcaaattacagcctaattctacgcgtatctgttgacataagcagaacgtcagtaaagtgcctcccaatatctctaaatagcctcttggcatctgaaacgtagggaaaaatattggttactttttaaccaaaaggcactaaaacttccaaaggtatatgaaatcagtaaattataaaacatgtccccttcccccccttctgtaagaaagaaatagaaaacaaaaagagagatgaatatggggaaaataaacaatgaaataatattatgaattaattgtaagacttgctaactggctgtgtaactttgggtgatttgcttaactattctgtgctttgttttcctcactgtaaagtggacaaactagtagtacttttgtggaagattaaatgaggaaaggcaagtcaagtattgagcacagtgcctggcatttactacttacgaaggttatgttctttattactccatctactctttccataattgcatcccctccaaccagtcctgtccagccttctccgaatccacaggacaattctggtctcccagtatggtgggcaaaggtaggttttggtgtccaagcacagctcagccatttactctccaggtccatgggcaagtaacttaacctctccaggttcctcagattcatcatctataaactggggaatattagtacatgctttataaggttattgtattaaaggaaataacttgtctaagtctcaatgcacaaagtcttccccagaagacagacttgaaaaaatattaactttatttcactctcctcctgctgccatttccaatgtgctgttgcatgtttctaaatggtatgtggaagaaagctgattagtttctttgctaattattaattgaattcctttagttaatacaatgtattcttttgagaagctcagctcaatttatagtgctagaaacatacaaatacagaatttatacgagttgatctggggttcacatagatgaaagggtgttttcctagcacattgctctgagaatactgtaacactcttacttcatgtatattcatgtatatacatatgtatatatctatatatgtctgcatctacatatgaatatatgtatatcaactgttcttatttagtatagttctccctgaaaaagaaggtactattttatttttaaatattggatcttatttttaatattggatctatctgtaataaagtagccaagttaggctgactacctgtctaatgagtttcccgtttagatggattagttccatttagtctgttccatagcccagatcagacagttcactaacaaatacacttaaattcacatcactttggtccagagggtgtaactaaggcccaaacctgcttctggtgaaagtgacccagaggtacgctttgctgataatatcaggagcatggtctttgtaattggaagacactgtctcccatctccccatttgttattgcaagaaaattagattctcattgaaataacaggcccaagaattatagtaacaggagtttgaacccctgtttgagaatgttggtactcctgggataaatgagatcaattttagcctataataacggtgctttctacactttttagatgttagagaaagtctggcagcaaagcaaagctttgtatataccatgggaggcagggttggagaataaaagaagaaagagagacttaagaacaaaattgtgtttgatgggatgttttgattttctttaaatactttaagtctctagaaataacaaatttattatctgaaatacaaataagaaatacttatatttggaaagttgataaaactcaattattgtgtaaaatgttcacaaatttccaatggatagaaaaaaataaacttttgcattgccaattattgaatacttattttcacctttggaaatagcaagtcagttacaaattttataaatctatataattgtctttatacataataaaaatattctgatgttttgtcagccaatatgcagttttaagcaccttcaaccctgttacatgtttacgggtttggaagttactggggaggaggtagaaaggtctgaccttctccccaggaatttaatatctggtcagagagaaagaaacagacttttgttgttgttttgttggtcttataaacagtgccaaaatgaatgtgtgtatgtgtgtgtatgtttgtgtgcacttgagcaatcatttttgtaggataaactcttacaaatgtaattgttctgaaatggtatgtatggtttacatttttaaaaatttgctaaattgtactccaaaatgtctctcctaatccatgtttctaacaactgtgtatgggtgtactgtttcccaccccctcacaatctgcatatttttagtcttttaaaaaaaatcttaaacgaatgtgataggcaaaatacctcattgtagtttgatttatttttggttatcagtgagattgaagatcttttcaaatggcttttgactatttatagttccccttctgtgatggttatttgcatccatgtcccatttttcttctgggttattggtcttactctaatttatagactctccttaaggcaaatgataccaaaaccataccatggctgtttacagtcgaccctcccagcttacgttgcattaataattgcttcttagaagcttatgttattcatccttctcctatttctacactgctgttttcttgcttccctaatttaacattctcaccattgcagtcagcaggttaaatggcaaacatctgaggaatcaagggaaacaactatgcattgagtacttgcatgtgctacatgatttaatctataccttctaatgtaatcctgaagaaatctaggagatatgtatcattgttttccagacgaaaaaattaagatttggttaaggttgggaaatgagactaagtaaataaagtggtaataagagactcaggtctgtccgatgatactaaaagcctgtgctccttccagaaaaccacgctttcttcagaaaaactgtttttacaagactgtattcaaacatatggcatgtcttgatatacatctaagtaaattttaaaattatatctatattcttaactgtccaataaaattgtgtatttatcatttacaacatgatgttttgaagtatatatacattgtagactgactaaatctagaaaattaacatgcattaactcacatggttatttttgtgatgaaaacacttaatatccactctgttaacatttttcaagaatacaacatattgttattgactagaatcaccatattgtacaatagatttcttgaacttatttttcttatctaactgaaattttgtttcctttgatcaatatcacacttgcacctccatttccagttgccccagcccctggtaattaccattctaatctctagttctatgagctcaactgttttaaatttcccatatgaatgagatcatgcaggatttatctggatatatacctagtagtgggattgctggatcatatggtagttctatttttaattattcaaagaacctccatactattttttataatggctgtactaatttacattcccatcaacagtgtacaagggttctcttttctccacattcttgccaacacttaatatcttttgactttctgataatagccattctaacaagtatgaagtgatagctcattgtagtattagtatgcatttttctgatgattagtgatgtggaatagtttttcatatgtctgttggccatttgtaagtcttttgaaaaatgtctttttagttcctttgcccatttttcaataaggttattttcttgccattgagttgtttgagtttcttatatttttggatacaaattccttattagaggtatagcttgtaaatattttctcctaatctgtaggctgtctcttcactcagttgattatttcctttgttgtgcagaagctttttagcttgatgcaatcttgtctattttggcttttgttgcctttggttttggagtcatgttcaaaaaatcattgcctaaatcagtgtcatatagcttttcccctattcttacatttatgtctttcatccactataggttgatttttatatatggtatgagataaaggtttatatttattcttctgcatgtggatatacagttttcccagcaccatttattgaagagattgtgtttccccaatgtatgttcttggcacctttgttgaaaataagttcactgtagatgtaggggtttatttctggctctctattatgtttcattggtctatatgtctgtttttatgtaagtacgatgctgttttggttactacaactttgttgtgtattttgaagtcaggtaatgtgatgcctttggcattgttctttttgctcaaggttgagttggatatttaatgtcttttgtggttccatatgaaatttagtattgtttttttctgtttctgtgaagaatggtattggaattttgatagggcttataatgaatctgtagattgttttgtagattgtttcagatatggacattttaatattaattcctccaatctatgaacacgaactatctttgcattcatttgtgtcatctttaatgttatacagctttgtaactattataaatgggattttaaaaatttctttttcagatagttcgctgctagtgtatatcaacactactgatttttgtatgttgattttgtatactgcaatttctattataatgaatagaagtggcaagagtggccatcttttcttgctctggatcttaaaggaaaagctttcaacttttccttgttaagtatggtgttaactatgtgtttgtcatatatggcctttgcttgttgaagtacattccttctatacttaatttgttgaggggtttttattatgaaaggatgttcaattttgtcaagtgctttttctgcgtctattgaaatgatgatatagttttcgtcctttgttctgttaatgtgatatattacatgtattgatttgtgtgtgttgagccatccttgcatccctaggatgaatcccacttgatcatggtgaacagtctttttattgtgtttttaaattcagttggctagtttgttgaggatttttgcatctatattcatcagaaactttggcctgtagttttctttttttgtagtgtccttctctggctttggtatcagggcaatgctagattcgtaaaatgagtttggaagtattccaccccatcaagtttttgaaagagtttgaggaaaattgatattagttattcttttagaaaaatttctattaacctagcagtacaagttagctagtttacacttggggctctgaggagatgtaatggagaaagagctgaaattggggttcagatttataaatctcaagttttggttgagcacgaaaggagagggagtgagactaatgataagaaggttaaagtaatcactggattgatttgggatgggcagtctcaaaagtgctgaggattcagttcctatttcagtgagctggaacacacaaacatagaggaaaaagaaagacagttcaagtataaatttgaatatacctaaatgtgtgtaaattacggaagaaacaacttcaaaagaaaataacaacaatgacatgggctacagaacagttaagattaatgatccctcattatagggtgccattcagacataggagttaaaaaaaaaaaaagcaaaccagaaccacacactgcagcagctccccagttgcaagcacactgaaataacagaggcctgccttcacgggaagaggattagttctactgtgacctgtttatataaaaacaatgttgtgggtagcaagattactagaaatgacttcttggattataaaggacaattatgatagcttaggccactagctttcagtacattccatctggtacgttacaaattagctcattattctgctgttcttacgaatgtgttagtctgcaaacatatcattgtcacaaattagtcacctagtgtttctctgaaagtgatttaatataagcacacccacatcataggatggaacagtaaaatgggtccttgctagatcctccaaacagaattcagcataaagcacaattcaatttccaaaggtttttggcacatacatcatcttctgattttctaagatgaaatgtgattgttgccctggatattggtaatacattgtaatattagaaacctcttgggtctccccatgaactctagagatccaagcctactgagaaatgatgggtccacaaattgagcatagcttttatttgtttttatttacatttgttatcgcaggtgctatcacaactgttgtttcaataatagcaatttcaatttgaaaattaacttaaagatcttattttgaagtgtgttttgtagcagatgagctcacccaccagctacttggaaagaagaagaaaagtgaggaaacataaacttcctctgctgtctaactggattacctactgagacatccccttgtgtgggttataataaatatttatggtaaacttcttaagttaagatgcctttggttgcaagtctggagcccccaacttaatggcttaacaaaaacaaatgaggaaaatgtactgtcttataacatgaattttcaaggtaggctattccagggtaggttattaagaggttcaaacacatcacccaggttctgctttgccatcttagcactttgtccttttgctcagacttactctcctcatttacacaggatggacagtcatagccagacaccaggaccaaaggcagaaaatgcaccctttcatgcctgagcaagaacttgtgaagatatatttttaagagagagagaactgagtagtgccgtgagtccaaccctaccctctcttaaagcgggctgcagttatctaactcacattaagctcaaagagagacctggccttcagccatttgatgtccttcccaagaggaccatctgggaaagccagtttggctccaagagcaagagttggtagggatggaaccactagaaaaccaaggccttgatgggggtgctggttaatcagcagcaattggaaaacaaggctcttgcttgagtcaaaggagttgcagccagaggacccagcagggataccaattatgaacccacaaaagtaccatgagacaaagaggcagctttcaacatctgccaggtctccaacatgtgatgccatcttacgatggcactaattcaggaaaacaaaacaaaactcttttcttcctttcctcaccactttctgtgccttccaatcccagaggagtcaataccaacggctagccagcctggatagccaaggaaggggaagagcaacccagtctcaatgccacccacttactccactgcacacagagactctgtggtgggcccagctgggagaggggagaaaatgtaagttcaatcaagtttagagttttgggttacaatttgaaatggacattctaatttctggatagagtctgagatgatggtttagcatgaatgcaaaggtctctattgcctaacagtacccagaaaagtcataagatgttctttataaataaagtttaaagggacagtttgaaagcaaataaaatgtgttttacactttgggagaccaaggtgggcggatcacctgaggtcaggagttcaagaccagcctagccaacatggtgaaactccatctctactaaaaataaaaaaaaaataaataaataaataaaaatagctgggtgtggtggtggtgcctgtaatcccagctctttgggaggctaaggtagcagaatcactcaaacctgggaggcagaggttgcagtgagccaagattgcgccattgcactccagcctgggcaacaagagctcaaaaaaaaaaaaagaaaaagcaaaaaacagcattttgctatctactacatgtcctcattttcagcaaatatgttacaatattgatatccatttacaaatatttttaactaccttgacaataccatatcatatttgtatctttcttgcgtgcttcccctttcttactctaatatttgaggggaaaattatttatgcctcctagcaaatatgcttctgatctttaaaacacctctgctccagcaaatggatcccaaaagagatgtgcattcaaggtgtggaaaacagcaggtcactggggggaatgggaaagttaggatttttattttttatattgctagagacagggtttcattttgtcacccactgcagccttgaactcctgggctcaaaggatcctcttgcctcagccttgcaaagcaccgggattacatgtgtgagccactgcactggctgaaaattagtattaatagtaatgtccttctgtcctagtccactgtttcactttcctttttcttcacggcttcctcctttagactcccttggactgggagtttagcactatcacctgcacactagacctgcagtctatgaagagaggctgtcagggatttggggctatcacagttgctcctcccagagcaaaaaatattcaaccctcccacacacacaggcagcagcctcatctcaaatggactgtgcctctaatcagtgagtggttatggaagacgaggagaaaagtgcatttatattttcattaactttgttcctgcttcctgtagcattttcattttgaaaatgagttgggaatttcaaacatcaataaaacgtgctgaggattctgacaacaaaatccttttttgtcatgtgctatgttgcccacttcctgctttttatttttgctccagtccctgtttgattgctaatctaaagggaaagggagggtcagtgagaaaagaggagaaatcttaaaaatgaatttactatttgatcaggtttgctactttattttgtggaaaattttaaagctcttttgtgtctttatgtattttacaaatcttggaactaaaaacaacagataaaatcacattatattccccattgaattatttcccacatttcaaatgtgcttcccagagagaaaagtataagatacagagctaggcaattcagtttcacattaatagttttgtgtctcatcagtttgggacgtgtattgttcatgttttgctttgttgtgcctattaagtgatttatatagtctattgcgatttttttaggaatggaatatgccaattatagagagaggtaggcgagttaaaagtttcaagtgctcagcattatagattcaccctcgagtcagaatgttaaaaacagcaaggaagagtgtgtaaaatgctaggtgaatgagagggcatctgtccacaatgggcaactagtatttaataactagccttgaatttattctacacttgaatgcaaagattattctacttaattatactacagtgactttgaaactattaattattctaaattattgggttctagtttaaatacatttttatatttttaagctttcaaatgattatttgaaaaaatttatctgaatatcctttttttcctaaaaaggaattctgccttttgagtactaaattattctctctataaatctaaaaatatcacagtatttcttttttttccaaaatctctctctctctctctttctctctctctcacctctccttatctgaaacaaactgacatttaatgaagaaaactgtgaaaaggggttcgagaaaatgagaagctagtattttgattggaagtgtaatagatgtcagtcagagaaaaagaacagtctccagaacatctagatgtggatgtagatgtagatacattgttaacgccactctgtgcattttaatttaagccacttgatcatgtaaccattaattcaatgtcaagttcattcattgtagctattcaatattacaatatagcattaattttaaatgactttatttcaggagggaaggaaataatttatgaatagcaacataaggtttcttatatgatgactcatcacaatgttgattgcaaaaaaagaagctgactcagactagctcctgtagaaaagggggaacatagttactatgaagatacagaaattaacagaaacaagtatagcagggcctattggattaggaaaactgaaattaaggcagctactctctttggggccatacaatcaccgatttctttttgtctctgtgtttctgttctttcctgccttctccctgtaattgccactgtctctttagttatcagtttgcactgaacccaaaatggtaacttcagcccctgagtctacaggacattttggttcaaccccaccttgaactgattagagtctcaatttcacttaggacatttcacattccaaagagcaaatattaatatttgctgcctagtaaatgaatcagatgtcagtgagtcaagttatcatgcttattcccatcagattttataatggtgaagtgtaggaaaggcaaggtctttagaaggaaacataggcagacataagtaatcatgtttggtatagagactcatttattaaatatttatgataataaaatacttaacaaagtcaatgtcaagataataaggactctgagtccttattatgcaccagatactattctaggcattagaggatataccaaggacaaaacagaccagaaaaccccactacccctagagcatgtaccccactacatgctgatgataatctttagtcatctatttcaaaaataacttaaaaatggagtggcaatgtctctgcgtagtcaattcaagatgccgaaataaaaatacatgtatatgtgtcttccttgtgtgtttctttttttttttgtatttctcgtgttgaacttgcatggttttctaaatgaaatattttcatttttaatgtttcatatatgtgtctgtatatatatatgtaatatacatatgttataaatatatacaaatatatgtatttgtaaataacatagtcatatttgcttttatacctaactctgttaactgccaatgatgtgtaattatatatgtgcatgggttagaagtggtggatggggcctttggattttaaatggcattttacctgcagcctctgatgcagcctcttccagcttcctattaaagtgactgaaaacactgcaaaaatatatatatatataatttttaaaaagcactaaaaaccagtactggcagaatattaaagaagcgttaaattagattgacaatatatatggtggaccacacattgtattccattctaaaagtaggaagaataatttcttagttttacctggaccatacaatacatctactatgtcctactactgtagtagtatatgcagcgatatactacttaagatttttaaaaagaaatatacaagcagacctaaaggtggatcaaaactaaagagttaagaatagaaacatccagaggaataccctcttgagatcatctactggtaaaaattcatcacaagagttttaaagagaataataacttttgtaagccccatctgattgaactgccttccccagtaaacctgtgagagtggagaggtttgagtattttcatggtaatttctttaccatgtgccatctggcaaataaaagagttcttttccaggcagtactttttaccaaattcagaggtcggtgaaatattcttacaacaacataaaaatcggtggtaaacccactattcctggaggggaggaagactggaaagaagtatactgacttgtcttttgggaatggaattatggatgacttgcttctttcttgtgtgtttattttattttatttttgtatttcccatgttgaacttgcatggtttcctaaatgaaataatgtttcctctttaaaaagaaactttaaatgatattgaatctagttaaaatgaaactatgtgataagtttcagattttataaatagattgtcaaaatatgtgttaaacattcttgataaaattacatctttgcttcaagcatattgtaaagaaaatggaatctattgacattacaaatagcaattttagcatccataaatttgaaattgtataaaaattgtacatattctgggtataaaatgttaatgcttgtcatgtaactttgtaaaaactttattttttaaagcatttttaggttcacagcaaaattcacagaaaggtccagagatattccatttactccaacccccacacatgcatagccaccccattatcaatatcccccccacaaaagtggtacatttttttttacaattgaacctacattgatacatcattatctctaaaacatatagcttacattagaatttactcttagtattgtatattctatgggtttgcacaaatttatattgatgtatatcttccatttttgtatcatacggataattccaacatctctggcatgtctagttctgatgcctcttctgtctctttaaactgtgttctttgcctttaactatgcattgtaattttttcttcatagctgggcatgtactggataaaaggaactcctgtaaataggccttaagttatatgggtgggccaggcatggtggctcatgcctggtaatcccagcactttgggaggtggaagcaggtggatcacctgaggtcaggaggttgagaccagcatggccaatgtggtaaaacctcatctctactgaaaacacgaaaattagccagtcatggtgacacatacctctaatcctagctactggggaggctgaggcaggagaattgcttgaacccgggaggcggaagttgcagtgagccaagattgtgccactgcattccagcctgagctacaagaacgaaactctgccaaataaataaataaataaataaataaataaataaataaataaataaaataaaaaagttatgtgggtggtggtgtggtaaggggcagtggaggggaagctttctatcattccataattaggtttcagacttttggtgagcctgggcctctggattgtgaatctcctaagtgtttttcaggttttttttttcttataccataggtgagagagaatggctaacgtgggctggaattgagtatttcctttctccttgatggtaggctagagtgggctggagttgggcatttttctttccccaggtcagtgaggctctaatataacaaaacaaaatggaacaaaaaaccccagcaggttaggctctgattaactagtttctcctcaggaagaaccaagcttcagcagatttaaagatgtgtactttttcccttctcttgctggaagcatgagagaatttttctccaatatttactgtgagaacttggtagcactcctggaggtaaaacacacagaattgtggggacctccctattactgggttcctctggagtttttcaactttcagacttgcctgcactcagcctctaacgatttgtcaattatagttgaggtttttctaccccagcactggttctcttggaggtttctgctccggtatgttgtgattctccatagcctactgtctatctcaccagtggtttgggcagcagtttgccctgtgacctcacttctcttatggatctaagaagagttgatttttcagtttgttcagcttttttgttgttaggacagattggcaacttccaagctccttatgtgaggaactgaaagctggattatgttacttttttactgggaggttgagtgatagaagaactgtcatcagaagtttaattaaattatcaatcagtaacaatcaattaaatttccagtgaaagcaaatctattttggatacatctaatcaggataaatgaaagaataagtgtgcattcttacaacatttctcttttttttttttttttgagagccattacaggtgcgaaccaccatgcccagctgataatatgagtaagttttgaagttgggctttattttattacatgagaaatatttttgctcctttgaattttctaaacaaatattatacaaagcctttagaaaagcttaagatataaatgaaatgtaattccatttcagaaggtagttttgacattacattatttgtattttttcttttttttccattttgattccagtaaattgcaaaacaaatgatctgtattttattatattttactaagcaaattttaaaggtatatgcaaacaacatttaaagagctcttcttattaaaaaattttaaattataataagttaaaattataataatctaagtgtttgtattacttccatgctacggataaggaaattgtgtctcacagaggtttcatgcgttggtcaaaattacacaaaaagtaaaaggcagaacctgaaaataagggttcacatcttaggactccaagatggtatacacatttgacttttttgtctttaaacttgctgtgaacatttttccacttttgattcttaagtataaatattaagtgccttctttgtatttcagtattaggcttttaagtcttctacttccaaaaaaaaaattaaaagtaaaatttaacaagcattctaaatattccaattatgaaatatatttcatattatgagatttttcttctgtaaaagaatttatcatttaagattagaagatttaaccttgaggagtatgatccaaaatggctttttatattagttgaatcatgaaaagtcccaacaaagcatttgctggttttaggtgatgaaactaggtgtttaatgaatttattttttcttttctaattggtgattgtaccctgggttatgagaatatgtagaaattgaatgtagtagctactagcaacttgctgaaacatgatgcatttccctgactctcagcaactgaaactgcggcttcatgaaaggcttctcgtatttcagttataaatgttcagaacagcatgccttcagactttgctagaacttgccaggagtggaaagtcatgactatcaacatcgttattagttaacattgactgagtaccaacaatgtttttggtgttataaatatagagaagaagacactgttctgttcctgggggattggctttctgtaaaggtgagatagagaatttggtcttgaatgttcttttcttgctgggaggtggggttggaagcacagccacctcaggtctcattctgatggcacactcacctctttattagttgatgatatatgcaataaaaagaaaaaaatgtataattacacatacatacacacatgtgaaaactcatgtaaattttattttttattggtaaaaaatatatatttatggggggagcttgaggcaaaaagtcacatcctgcaagatatccaggtgacagtagcttctatatccttgtgtataatgtatttatactgttattaatagtatatagaatgtgctaagaaaagtacatagaagtttttgtatgtgtaaatatatttatatgaacccaatatgtagaatacagggaccaagtgttttgtttttgacatctaagggacaaaagtaatccagcctcttgaaagaatggagactttccaaaaatatctgaactgattattggtattcatataagataaataagtcatcttttaggtctttattctttgatgtctaaatatacaggagttttatttcatcaagttatttaagaggcaaacattgacattagctattgattataccaaaatgcaatgatgacaaaaaaatataccttaacatttgacattaaagttactttctgaaagtgaaactcagggaaaatcaatgaagtaactcatcacaccctctgataagtacaagtgactaaagagtctaggaaatacccaacctcaggaactagggtgtgactttattatactatgcttatactagcataaaggttgaacttaatcattcttttatgctcattgtgaaggaagtgtgtaagttgaaggcattttaagaggatgaaatactgaaactgatattacagagataagaatttgtgtagaaagtattaattctgtatttctactgttacatttttgtaattttttttaaagagccagactttttttgtatgtattatcaaactttgagataaaactagttaaagcagaagagctcttgttgaaacagcacaaagtacctggcttcctagacccagcacaaagtaccttgcccctcagctgacctgatgcaactttgaaaaaccatagggttcccagaaacttagtttgaaaaccttcactcttatgagcataaccctataaccatgagagaaaagggttttattggaaaaggacgtgggacaccggctagttaatacttctggctctgattctggatgcattaagcgatctttcaatgaaaatgttgaaagtattttggtttgctctgagtttgtagtttatcaattaattgagctttttattgaatcagcctcatttaagggtagttaatataagttcacttactcttgtgcttgctgtgggattaaaatttaaaaaaaaacacaaaacaaaacaacaaaccagtctttgctctagtagagctgaggttatgccatagctgcagggacttcactgaggttatgccaatttgtggtgccctgctaataattcgcactcctgtattgataaaaataatggggctgagattagccataaagataatcttttatggttactcctgatatttctttttaatttttttagagacagagtctatgtttcccagcctggtcttgaaatgggctcaagttatcctcctgcatcagccttccaagtagctaggactacaggcatgagcaaccagaactggcttcctgatatttcttaaaagtttcatgaaaggatgattatcttttagtgtaacaaaatagattagcattaccctaacccaacaacattttttcatttttgacaacttgtttttagattacaaacctattagttctgcctaactgttgtttcttgaaggccatacatgtaggaagtattaaatttgtaaagtatcagcctataaattagtagacataactcttaagaccctctttctaatataaatggaataaaatgctggaaatgagttatttctattttctaagcaagcctattcttttatatttgttgccttatgtctgcaaaaatattcaattttggattgtttaataatgtgtagtcttgattctctgaactgtgaaataaattacagttttttctttgctatctttcaagcagaaatttggcttttctgttatttatcatagtttctcagttgtgtttccttttgttctaatttgttagactttattctagacagttgcatgtataaaaataaaaatccaacgaaaattcactttaaaaatattcagctaaaatgtcctcttagtttaagtatatttagtagtttaatggccaaatcatttgtattttatttataaagtgctttgcttatatcattgcccgcaaatggaaatgtagctaacaagtattgaatgttgaactgtgtggtagtggagaaagattcagaggtattcttactatcctatcacccataggtgatggtttgacatatgaacagagtagaataaaatggactaagaaaataatgtcagataaatgatgttcattacaaaggaaaatatatttttacatctttttaaaaaatctttgcatttgctactttctatggagacctactctcttgtataaggactgaatgttagttttaaaataattaaaacccatcattatcatcatcatgatcaaagatcactaaccagagtcaaataatttgaattctcttccagatctactgctcacaagatgcctgataatgaacaaatacaatctttttggcatctccaaaatgggcataataaatgtcttaatctcctcagcataattctgtgatgccaaaataatacatataacaataatattttagaaagtataaaagtataacaaggtggtattattatgattacagaggtgctagaatattgtggtaatgtgtacaggctctggagccagacttccttgattcagatagtgactcactagatatttaacctcagacatgctacttaacatctgagtgcctcaatagcctcatctggagaacagggctagtaacagtccttaactcatagtgctgttgtgtggattaaatggggtaatactgtaactatcttagaatgggacctggggcattgtagatgttcctagctcttaaataataatatttaaatgtctaatataatatcaaaattttaattacttgattcaaaacattcaaagcttgttaaaaacaatgtaggctgaagttttctgggccagattacaaatgaccttatggaagagatttagtccctttagcaaaaaggggtcatgaggacactgcctaggctacaggaaatctcaacaaatattctcaagattcttttatgctgtagtggcatctttctgaacctacaagttcacattggcttttaaggaatcacccagttcttcttcctcctaggaatcctccttttaggatcatcttttgatcaaaatgaaaattctccaaattatggtggtttttaagattagttttctttatactaggttttgaatttatgggacatgccctccacccaatcttgggtaatattttctgcaatgacaggacctcactggggaaatcctaaatgaagataatagcatgttatattaaatgttgccggtattccatttaatatcaagcaattgcgtaaaagcctttttaaatacctaagttaaaagtggtatattaatgttgagtgtacttctactgcaaagtccattctcccactgatttcaaacaaataccatttaagtgccaacctactattacaagagtttactattttattcttgctccaaaatggcatcaacagtgatggggtgcttttgggggattattgaacagaatttttgcaacaaaggagcaagcatgaagaaatgcaaaacatcagtgatagggattgcaacgttttatctcagcattcctcatatctacacaccccctaatcaaacaagcagttttatggcatgcgcaattgcaattgaagtacaactgacttctgcagaaccggcttccataggatttcctgtccaaaaatcaccatgtggtcatctgcagctaaatggttacaaatcatcaagtaaacaaggcttccccaccccggtgctttttttttaaggagtgaaatccaccaaactctatcatttgcaaattatctctggacttcttttatttctttttttttcactgggtaagaaggaaaacgagcaaacaaaaaatcctccctccgtatttgtttaaggcgtaatttccctgtgaggtgttttacaggcttctccttgtttagcttttcttgcctggtaattactgaaagaagtctgctcttccagggcgagctattcctttaaccccttttgcttgctcttacttggaggttagcaaggagtgcgcggctctgcaatgtctgggaacccacctagagggcccccttgacgccagcacatcccctgtcaggcagcagtctctgcagctgagccaggctgctgcagagttaatgtacagtaccacggagcctgcaagtgtcctgagctgatcagagctggggcggcacagcccagggcagacaaggcggctgcgaggattccaaaggttctgctggaaattcggcgctgggggactccagcaggagcctgttgccattgtgttttaaaagcatgcaaggtctgtatagcttgggcatgagaatctttcagaagatgtcagagcatcagaataaatgacacctattggaaaactgaatttggggtgaaaaacaaaagagattgagagaggaaaaaaaagaaaagaaagacatcgggggaagaattcttagacaacgtctgacttgcagctgtgaaattcattttctttccaaggcaaaatatgaaaagctcccacatggttttgataataacaaaataaaggggattctgcagtgaaaagatcaatagcttagtcattttacttaaagagaacagccagccttattatggggttaggcagcagaaatgaatttcatcgtgacagcatcttctgaagtcatgatggtagttaatggtaatcttgtcctgcagagcagaaattactcattgccttcctacttttgcagttgaaccagcaattctgaaatctgggaaagaagttggctttggtgatacatggtttctagcccctctgcccaggcctttgtccgacacgtctcagacggtagcactgcgttaaagtgaccatacatgaatatgtgcctaagaaagaagaaaaagcaatattcatttctaaaggacagcatggcaaagcaacctgaagttttccatttcccttctaacacttctttaacaaggatatcaagaaactgtcttttgactcctttcttcccacattccagagtccttccttaaggatgcattaatttacactcaaggcggttagattttaccaggacaatatttgccaccatttaggattattagttgaactggttattttagtatgttgactaactagtggaacctaaatggatggacccatacctgcagtgctctgtgatgtttcttttttcaaatcctggaaggccttttgtaattgctatttgtttttattggtggggggagattttttttttttttttttgggattcaatacttgttgcaataattgcccacgatagctgctcaaacaagagagttggaattcatctgtaaaaatcactacatgtaacgtaggagacaagaaaaatattaatgacagaagatctgcgaacatgatgcacgtgaataattttccctttagaaggcattcctggatatggtgagtaatcaatattcccttcagtttgtaaaactcagaattatcaaattccgtgacaggtaccagatgaggatttgtcttgaactagagtattggtatcaagtgagaatgaaaagtaaactgtgcaaaaccgaatattgtctgagaaagtaatggttatgcaataaaaatactttgttaatatgaagcatccccaaataagtcaagcatgaggacttgagaacatttaaattgctaatatttcatggaggaagaaaaaaactttgagaatggcaacaatttaataaatttttttaaagatgaggcttagggtttgttttttgttgttttgctatttttatttgaaaattccctggggaagggcacacatgaatttctgatatatcaatttgtctgaatttctaaaagaaggttaagggaaacttagaatgttgactcaattttaaaataatgctaaaatgtgttggtgcctcacagttaaggatattttagctattcaagaaatatttctaccagaatgaaccagtagaattctagtagaattctaacatatgaatcaggaagtgctcaggctctcatagaacttgcttagtgccttgatatttggtcatctattaaggttcaatgcaatgcattcaggtccctggacatgtgatatcatgtgccatttcttgctggagtttatgactaaatgtgtgtaggaactcattgctgagggtatttataagagcaaaaggtcattattttaaaattgcttgtttttgccatacctttagggtcagctggattctgactttcatagcagaaactttgtgaatgcataataaaggcacatgttaaggcttagtgtctgctaacatgggttgttttggaaatgcagtttgtctgattttgaaagtatatctttcaggtaaatgttctggctggactctggatgaataatagatacctaaatataggtttcggagggctttccagctgcttttatgacaatgtctcaaatgaaagctccctgagagcttaaggtaccaccaaaatcacctgctggtttgttacagagttttcggctttcagctaaaaaatccattgcagagaaggatgggaggcatcctctcccactctaggcaggtgcttattttctaacaacaccagatccatccagagtcgatgctgtggcgtatctaccttttttgctgaccagagctactatccccagtctctagaatgcttgggtgacatgcctgcaaacctcggtggcccacttccaactgcatcaccagagtttcctagtcagggggagccttggtgccattgccttgcttgttctgttggtgagggtcaggcatcagcaataaggtcctcattattcttacagacaaatttacatcaatagtctttaatcttgagattaaaagatcctggaaacagttcctggcacgtagtaggcatttgtcaattatttttcttctatgccttaggcttttcttcagagttcattttatacctcttaagatttgcttgggaggggaaattaccagtctcctttctatcaagtgtaccttgctacaaagcaacagtttttgttctacctaagttctgctgtttaagcccatttgtttatgttgtaatacataggatccatgtactctttgaatgcctgcaattataagcactttttatttttattgcattagcctcacctatacttttgactggaaagaaataagctattcaactctgaagttttggaaagaatgcaaatttgcttattcatgctcctctagatctgtaatacatatgtttgaaagctgtatggagaagttgagagtcctgttggttttcttttgtgcctggagttaggtaacccttcatctgcttcactgcatgtcgtaccaatctgttgttgttgttgtggccaaactaagccaatgtagaatgttaatgctctgtataactcctactcttcctgggccccttgcagggattcattaatatgatgttggactcaaaggaagaaggtggtggtttttttccaggtgacctaattaattttgtgcttggttcttgactttctcaatggttgttgttttcctcttatttatagcctccccttccagtactgcagtaagagattgtaggggtttgttgacagaaaaccctctttccctttgtcctactgtaagagcccctatagggtgagatttcaggctcgtgaattatcgtgcttagaataaaggtctcgccaaattgctcttttcatctccaaagactccccctatcctcattctcacatttagagccttttcttcgtgaagggaccgatcagaagttggcaacaggccagtgctaaggaataataaacattgtaaaagacatatgtgctttggtttcacgagccctagctcatctctagaaaggctctgtaccctttggagaggcgggacttggcatgtgctggtcctctttctgtcctgctttttgagaagcaagaatgagaaaaagctgagacacaggaggtctagggtagtcttcaaattttaccagaagtagtaattgaaatagaagcctgtgcacagagttcctacttgtactctcatccacctgccctagggctggtgtgttgattattgagcaatagtattacaaattcactctttatcagttatgagttaaagttaataagtggtcctattacttggtttaatagaacactaccccttccgtgctaaaagagtggtatgaagaatgtgtgtttcttctttgaagctacattagaaatattagctggaggattttattgcgaaggcttctttccattacacttttcagtctttttactgccaagccaaacaaagataagggtttgcctcactggatagataagtactatatagctcttcttatttttccttctggctagttgttagaatggagagatagcctggcattcaggaacaagtatggcatggttgaaagaagggaaatgcaagtcagctttctaggaatttaaatttcatgtagcagcagttaagaggacctttagaagcattatgacctggaatcacatgccagggtctaacatgaatgacctaacacagtgtgactaacatgttcagctttttgcctgacttaaaagatatataacaactttttataatcttatttgtaaaaatactataatttcatgccagaaacatcaaggctatgttgaatgcaattgaatttcatagctaaacaatttaggagggcattttatttaaatacctttgcatccttttaatgatggattcacatggctaaaaggacagtggaagatagaagctaaaggccctggctaggagaggctgtggaatgctgccatggagggcccctctgaggacaccagaggaagatttgggattaatgattgtggaaggtgattaatgatttgcttatttggtgcttagggtttaatttttaaaggtaggacatctaaatgttttaaactgtctttgtgatgctgagaggtaactccagtgaagaggcaaaatgaggtgactgtggcactttcactcaacatggaggcatctttttccttcttctaggaccctaaattctttcattagactgtccttttccaggtatcaatttctaaaaggtttagtctagaaagttatttgtttgattgttcctctatagaccaagcattcaattcataaactaactcatactgttttattctgttttgatctaaatcctttatggaatgaagcaagatataaatcagtatattgataatatattcatatatgtgttcataatttgcatgtatatgtgtttaaatctactaatataatgaatacgtattcagagaaagtcagaatggcctgccttctaatgaaaagataatccttcctatctagcctcatagagtttcatcttttaaggttttctcctcttcatacattgaaattacagaaactcaatccagaagtgcattttccagagtatgtgttctgaccaatacattatattttattagaattttagggggtgggagcaatattgagtttgatgactatgtatacgttgaaggaaatgacgtatcaagtctcatgtaagataatggagctttgctccttttagttaacttaaaattattgcagtgtctgcttgtcttccagtgaaattgcaggtaatagctgaccttgcttctttaacatctcttcctctgggttacagaacaacccagaaattctaaaatataaataccagactgccagcttaattctgaattcctgttggggccaaatacaatttacttgtaaacacttaggaccaataaagtttagatggagctcataattatacaaactcatctcgttcacaaatccctagggctcaatgttaaagtcagccattgtttaaggcagaaattcaggtttagatatagtgtagcaaagattttccattatatgagatatcgatcctattaaacataaaacttttctcttggctttctattttactgtcttttgttgccatcagctgtatgccccttaattttttctagtaataccttggaatttaaaaatgaaattacaaatgtttatgttttagtgtttttaaaaataattcgattaagtatgctatgatagaggagcaaagttgttattagtaatatcaatgtgcttacaacttatggaaatgaaaaatagtctttagtcctagcagcctttctgctgtagtaaaatagtttgtgcactttaaatcgctgtgaggttacatcttcaaaggactgagtggcataagccagggaggtcttagaaatcttacaaaaggaaaaaaataagaaattattcctcatcatatgaaaattatttactaacaatgtatgatgttttagcttcttttaaattcttcactttccactcctttttgcttcttccttttagttgactattactgagttacttacactaatgttgaggtatttgggttcagagaaaaataggcaagtaaaggaaaattgaaaatagtttcaaattctgagatgcaaagaagaacccaaaaaaactaaacaaccagttttttattgccataggtcgaatgttcctttttaaaaaaatccctcatccttttctctcctctttcaatcatatcccacaaacgttaatgctcattaatactctgtctagctatagcattatccacatttttgcaatagctcaaaaatgtctccaagccataactgctgcaactgcttataacttgatggactattaggtgacgtttccagttgtttgagaagtaccagcctataaacatacccaagacaatatattacaactagggattatgttgtgtaaaatttatacatatatatctctccatatatgatttcaaggatagataatctagagtctacataatcaggctattggctggaaacataaataaactaaaaaaaaataatttaaaaaaagcactccaggtttctaattcagcttctggagtgttaatgttttgtgtgaccttctgaaagctctttgagtttttaccacttttgaaaactattacagcagatatttacccacttcatgttaagaagtaggctattaaagaaaatctcatagcacattggtaataacaatttattagagaccagcctgaacaacatagtgagaccctgtctctctctctatttttttaaaggtagctgggcatggtggttcatgcctgtggtcccagttactcagggaggctaaggtgggagtgtctcttgaattcagaaggttgaggctacgataagccatgatcatgccactgcactccagcctgggcaagacagaaagaccctgtctcaaaaaaataaaagaagaatttattagaatgttgacaatgacatgccaaaatctcttgtataactatcatatacttcatggaagagatcaacactgttgagcactcctctgcatgccatatgttttcacataagttacatcctttaatggcaatataactttctgagaatttcttatccaaatccctgtttgcagatgaggaaggtaatgttcacagagattagataacttgctgaaagttcatatatctattgctagggaagctgacccactcaaaaccaggcctggcctgattttagagcccaatatatttttaatccaccatattgttcttgtggcagatgacttagcactcttgtttatggatctttttgaaaattagattagcagtagaccagagaaaataagcagatttaccctgttatttagcagcctggctaagtatgtaggatgcttactgaatgtgaatagcctttccttgagaaactcttccttttaatgttagaacaatgacctatacttagactgtgtcagcagctctttctgtattttctcagaatgagaaatttaaaaggaatttgtggtgaactctgtttccaaggtcactgtggcctataggatcctttcactaaaaagtgcctctctggacgatatattaggaaaggtgtcacactttgaacagatgaagtagaaatgcaaactacagtacttggtgaatggacagagcctctgttcaaagcaaaagtcactcttcccactgggtacacacttggtgtgtggagcatagatgaattcagctctattcaccatctctgcggggcattgttgagccctgttcaaactgcctatctctggccctgctttgatacgggctccagctttactttgtgacagatgaaatggttttgagaatgctttgccaaaaataaaagatcatccacattttaggttttgctgccataattattactttcttcaaaatattcaactaattgtatgtctttaaacttcattttgtgctcaagtaaagaatattagtattatctgaaatcagatccaattgccaaagaagcattttaatcataaaatagcccaatttctgagttactgaaaaatgtcatggttagtgaattatattggaacaggtggaacacactgagttatttattcataggggatgcccagatgaatgtaataagagtcctgccttggagatactcataaactagtctggagaacagccacagaaacaaataattacagtatagtatggagcatattaatatagatatatacaagttgttacaggagtcagaaggagaaacaacttaactgacttgatccaaataccttaagtttcaaagtgaaaatatatttgatggatttgggaattagtagttactgataatacttcagagagtggtttaagggagtgtctgggggtaagttatatttcaggggtaataaaagcagagaaaagttgtgcaaactacttctttcaaaattttgcttaagaacgaaggaggaggagaagaagaggaggaaagaggagaaggagaggagaaaaacacagtagctagtgaagaacaccaagcacttttaagagtaggaagcatgtccctaaggaaatattctgatacagagctgggaaacttgtggacatgacaccctctgggatagggggaggaaaaggagggagaatgcagataatgtggagattaggtaggtggaaggagagcctgagggagtttttgttttatgccctgtgttttctctgggaagtattaaatggaattcaagatcacatctcagaaagaggaccagggaggagcaggtggaggagcttagtaagatgatggaacagctactagggggaattggaaaggttattgaagagagagtacaagacagtcaaacaagttggaaaaaggtcagtgatgttgaatgaatatatccagtcaataaaagacgttttactctacttgagaaattatttacacaaagtattatgtcagggaaatgagtagagatgtgacagaaatgttacaattcttaattattaaatttgaaactgttttgtgatgagaatgtctcctatggattgtgtttcttgggattccaaagaatacagagttgatcttaattgttgttgttgttttatttggtagtggtggaaactgttttatgaacatattaattagattgcagttccattttcatgacctgattttttgaaaatgtgagatttcctgtgctgccttgaaataactcttgggtgacaaacagaagctttaagatgtttgctttgaattttatcttcaaatgaataaaaatcacagtgggaagaaaagccaaaatgattcagctttgctccctttttaataggaacctttctgtggtttatgttagaatgtcacaaatccatatatatgtaacctgcttttacaaaaatttcttcaaaaccgctatgaagcttacttgaaagtgtcaccagtctctgagaaatgtactggaaataaggaaacataatatgactttaaccagaactgatgtaacccagtttaaatatttatacatttaaattctcttttatgtctccaagataaataggagaaaatgacaaataaaatatgtaagttaagggatattattaaatagccttataattttctaggtcatgagaataaaccctggaggatactgtgactttagccaatattatgaattcctttcatctcttctaatcatctcagcagagcttccgctattattgtcagcattcagtgctcaccactactttatacagagcttgctttgtagaatttttgctgtggctctaaaactctaaataagattctaaaagtcttagtcacttgtcagggaacttcattcttcctctcccttgagtctccatatttttcttttctaaatatgaaaatgagaaggttgacttaactgatcactaaggtgctataaaaatctatgatcttatatcttacctagttaatttactcatttctgtcttattcaggcataattgttcttccattaaaggtaatgcagagaaaccacacataaatcaacaaacacctccaggactgagctctgatgcttttctcaagtatttggcctctcctatggaatatccttagcctgtctaccttgggtattttgcttaattccttctccacaaaacctaactttaaatggcagcctttttcatggggaagacagcagcgttatgcccgttaatgctgatatccacagtatttgagaaaacatattccatatgcaacctatacatttctcatatcttcccaactcttctcttgataaaggtctcaggcccttcctttttcatatatcctccatttaatttaaggaaataacatgatatgaagtcctcaatcttaagaaccttgtcattgggttgctcactatgtttaaaacaaataattggcgtaatgatggagagtcccttgatgttctagagaagaaaggaaagctagcaatgtgacagtgggcaaattgagaaaaccgtagtggtattgagatcagtgaaagagacctcttacaagtcctaaagtaaggcatttgagtcttaaacctttgggtgtgttaattttaaaagaagaaaatatttgtgggaaaagtcctattttttagaaaataatctgtgccagatttgatttttgagagaggttgaatgctaagttgcctcaggatgtcatcatttgaaagggtgaccacattctgtgagatcttcactgcacacaaccttttgcttcaaagaactttctgagaccaagctagcctttgagaccaggtattaacattataatctgttctattcattgcagtagccacctcgactacttttttctactttataccacaatacccagcatggtgttgtacttaataggtactttttaaattttttcttaataaataattatgtgtacagaaaagaatgataaataaaaattatattgtcaggggaaattttaattaaataactttatatttttcaaataatgttattgtgctatgttttgagataaggtagggtcgtatgctataaaaaataatacagataataactatcacatttaacaggttatccattccaagtatagactaatttttttatagacatcattttacttaatcatcccccaagtctgtggcaagggcttgttatctacttactaagggtgcaaccttgggtcacttatctaacctctccatgatctgtaacatagggacagtaaatagttctcattgcatagggttgctgtgaagattaaatgagaaaaccagtctagtgcttagaacacctgtcactcagtaagtatccaataaatattgttatagtacagattaggcaactagctgtgaatggttaaccaggttgcctagggtaatcagtggcaggccacttccaacctagatcttacccattaactataggttgcttggaggtctaaactgcctcttctatatcacattcttgttcagtaaatacagggacaataccttgggttaagtttgaattatgagggataatttatacctcctcatctctcaagcctcagcaagaatcgactgatgtgccctcccatgttgagtcagtgcctaccttatacaggatggattttctgtttatgactgtcttactcaggccctgcttcattagattctctgttcttagcacagtgcctgacacatagtaggtgctcaataaaatgattttagagtaaacattacttttccagaattgtgtcctgggaatttacggcttttaatattaatttcaggtttttaggatatagcccatgtttttggggggatagatactgtttctataaaaattgtcatcttgagcataaataattcccacatatcttgatttctgtcacttgggagagtttaactggatttgtagaagcaaccatcctgccgaactgggtgtatctgtaaaatctaaatgctattgctacaaatcaccttatctaagacaccatttcttcaaaactaataactagctcattcactttcatataggaatctttctttccttgaagatatgtatgttttatcttgctggtgagataaaagtctgtaaattatctccacagctggctctgatgcttgattatgcccctttctgcatctataacattgatgtttcattttaattacttttcatcacagtacatgatgtggtcttcagacatagaccagcctctacgtgtggctcttcgttctttttatacatctttcactgtcaaactaagctctaaaaatcatctccctaatatctcttcacttgccaagaaaatgtactagctttgtattatatgtaatacagcataaagctctgcctcatctggcctcctcctttctagtctcattgtagaaatgataatttttattaatattatcagtgttaattaatttctctcattattctagcatacatatcctatatttgagtttttaaatatatcaattctttagtatagtggttataatcacactatatatgtatagaatgaggttttattctcactttattatgaaagagtatcaataactattttatatcattatatgtagttttgtcagagaacatcctgaaaaattaacttcaatgttttaaaaagccatagttctcagtgtgatggagatggtgaggattggagaatgtcattagggaaggcagttgtatcatttatcagaaataactgcaagactttgttggggggaaagtaataaggagtatgaaaatctggaggttgaagagtgggtaggaagaggaagtgacaggtatattttgataaagcattcgagggtttcatacctctctctcttaaccagtagtacaatgcaagggaaagatcccatgctttaaagctgtattgaaccaagttcaaattcaactctgatgctgactggttaactttgagcaaatcaccttttatgagcatcacttaactcatttataagagaaaaatagaacagttccaatcacccagatttactgtaaggattcaatgagataatacattatttaatttgtcatttttaaaccgcagcttttcccaggcagcatttaagacaaccaacaaagttatatgtgcataacttatagggagaatgttgatgaagggcaaagagaaataaggtatgatgttcctactcacatatgtatgtaatagttaaaaaatatatatatatatattacctttacaaacggcaccagaatcctcttggggaaggaagaaaaatgtctttgctagaagatatttatatatatatatatataaatatatatatataaatatatatataaatatatatatttttatatataaatatatataaatatatatttttatatatatatatatatatatatttttttttgagacagagtctccctttgttgtccaggctggagtgcagtggtgtgatgtcatcccactgcaacctctgcctcccagtttcaagcggttctcctagctcagcctcccgagttgctgggactacgcatgcaagctgccacacccagctaatttttgtatttttagtaaagatggggtttcaccatgttggcctggctggtctcgaactcctgaccccaggtgatccacccatctcagcctcccaaagtgctaggattacaggagtgagtcactgcagctggcctagaagagctattttgaacgtgcccttgggataggaagaaagtccctgaggatctgactataggtaggtgctcaagtgctctaagggtgaaaacttctctgcataacagaagaagaatttagtgctaaagagccaatgagaatgatggagatgaggcagagaaattaggagagaggacaggatgaggaaaattcgccctgggaaggctgagaactgcgggtatactccataaacagatccctccccagtactgacagtggttcggtgggtgaggggtattggggagggtacagggagttgctaggggtgggaagaccactaatatatgtatgtcttacttgaagcctcaggagtacctgaagtaagtgattttgatggtgttggtggcatgtgaatcaaaatgagctgtgttgtgttggcaaagcaggtcaatgagcccagcctttaggaaattatcagaaatttagaggtgagttttgggattcttactggtcatgaaattaggaagttcaaatcaattttgtttagatctcaagggaggcagagggccttccatctttcaagagttaagcagaccatgaagtccaagggtatgcaagatggaatgtaaagttctcactaagcttcctaggatccagggtaaatcaggaagcttaaacacaaatccccgtgtccattggataaacaatttgatggatcagggaagcacaccacttatgatactaagatcagaaagaaatttgtcctaagttgtgcataaagattaatgatatacatatataaatcatggtatctgctcaacttagtgtgtttgatatattttagttcctctcctgtcccttttttcccctatggatttctgtggaagattgtagtatatttgaaagttctttgaaaattgtaaatactattgttagtttataattaaaagaaagcggccgggcgtggtggctcacgcctgtaatcccagcactttgggaggccgaggcgggtggatcacgaggtcaggagatcgagaccatcttggctaatatggtgaagccccgtctctactaaaaatacaaaaaattagctgggcgtggtggcgggcgcctgtagtcccagctactcgggatgctgaggcaggagaatggcgtgaacccgggaggcggagcttgcagtgagcccagatagcgccactgcagtccggcctgggcgaaagagcaagactccgtctcaaaaacaaaaacaaaaacaaaaacaaaacaaaacaaaacaaaaaacctgtgtaccagatttcattaaaatctgattaaatactattaaagaaagtataataaaatagatagtataagaaaaggataatccaaataaaaaatatgtttcttattaaaaaatggtatgtcttgccaaattttgaagttaaaagcacagcattctcacttctttaacccaacttatagcccattatagcactagattttagaatcctgagtcctatgccatctgtaatggcaacagtcttacagggtgatacaaccttttgtaattcttaaggagacttgaatttttgaggcaaatgttgagtctatacgtggacatttgttgtgtaagagtggaagtggaagtcaaaattctgaacaaggttgctcccaataagatctgtcagctcacaagattgcttccctaggcttgaaatgtttcaagcacaaattcaattcataaggaaaatgagaatcatgaaaatgattatgaaatagcaagcagtctggaaagaggatgtagacgaatgccaaagcttctggaatttatgaaatatttccatttatggggccaggtgaaataagttgttctttcagaaatgtgtgacatggctattatatattatccccctaaaactatttgatcataaaacaaaacaacaaaaacaaaaactgataaacagcaatgacaaaacaactaaataaaaaagaaatgcagttcttgaatacaggatataaaggctcagtgcactttttcattttcttattatttcttttccctggctaggtgagttggctgttttatattggcactaagagtttgataccactactagaatagtcaagtatttgacctggccatgagtaaaagatgtttgattgacagatgagtctatctgtgtcaaacagctttaccttgagaaaaatcacaactttgaaagcagtaacacttcaaaagaatattgaagattgtggccactttcccccacctctccccaaaatctatcttcattcaagttcattataagcagctcctttgggtaatttgggttgcgtgctttctccaccccttctgtatccttggcttcttcagagcgtcaatcaagacaagcaaaagattcaagaaaaaaagggaaatgacctttcagtacctgagtcttcacaccaattcatcattgctaagtgctccaaaactgctgagtacagtatttaggaagtgtccagtacatcagcctggcatatattgttcttaacttgaggttactaatgcctattgcaaatgtgctttacgtcagccaaatgatgtgtttaaaaacctctatgtctagcatgaagaagaatctctttcattctcatgttaccttaaaagattttcataccaatatacatcagggaggagcaaatttttgtttcatatgttacacatgttatggtgcacatgaagactggaaacggtagttatttgttgggcatgtgtatgaattagtatgtaaaatacacagcatttttttctcttctaagttactaaatattagatatttaatgtatttcttttgctttgctaatttattcaaatgtaatcctgactaatccattattttgttaacatgtctacttgattaatgtgtttttcccctcttctaattctgatccacaaattttatagctattcattgtattacttaatctaagtccactaaagattatccttattcatgtttctccattaaagacaacgataatatcattgagttagcttagttcggatagaaatttggctagcattcattatttgattttcttggagttttgcaatttttttttttttgcatatttgtcaacattgtatactcctgaaagcattgtgtttaaaatacctatttcttgatcagtagaattgatatagctgacttacacggatcaataacatgattttaagagcatttcaaggaaatctctcatctgcattgtctttttttctaacacagtttgcactatttacaagtgaaaattttatattactttacatattttcctgtaaaaattagaaaactgtattctttggcacccgaatgtgtccttgaattattaatttgttaattttgtatgacatccttatttattagagaagcaataatatttctcatgggaatgcatgtattaatactttcagaggtccagaaagtatcaggagattaaatactgagattaaagagtactctcttcccactattatgttcagttctgattttccagctgtgtagctagaacaaagaaagaatgtgggttttttttaaagaataagacaaggctagaaggtatgcccttgtgagggcgccactgactgtgtcatcacaggagggccctgatacatgaatattcggtctccaggaagccaagtatgatattcacaaccacataataatgtgctaacctcattcacggtaatcacagataatgtagtatttgtgtctgccatacagttttgaaggtaaaatatggaacctattttggaaatttcacataacatcttaagctgtattaatagaaccagaataacccaaaataaagaggtaatgaatgcacttgaccctgcatcattcagacctcagctggaatattgtgcttccttttgggctgcagacaaacagaagaggactcaggagagtgacaagagaggaagcaagctcatgccttgtcacatataaagtggttgaaagactgcaattgttagagaaaatgatgcagtaattgaaggatgggtactgggaagaggctagttctttgaggctgctaatctgaaatataacaagtggatgcacctgcagtaaaagagattaagccccagaatgagtctggatgttctaatggtcagaacaggcatttcatatgacatggcctgcattggtccaggtggcgaagtaaggatggacaaacatgcgttgtttgcaatgataaaaaatcataagtagatgataacattgatttgctgaaatttttctcttttttgtttggtgtaaaactttatatgtcgtactttttgccttgtggtttttttgtatcttaggacaaaggtattcttaatccctttctttgtcttcttgaaagatgcaaccatgcagaaaatgcatacctcctgtaaattgtttcctgtcttttagtaaacctttgtttaaatgagtcatatgtttagcaattttaacattttaacttggctctaattaatgataatatagcgtgatttatggtcttctaaagaaatgtagacatagaaaatggagatagaggttaacatgtgaagaagagtttgtattttgggttagaaaattaaatattggcttatgtcagtaagattaggccttactatttgattgtacgagtttactttaaatttctaggctttcagggctttgtaaagataaattttattttaaaacagctttagatttgcagaaaaatggcaaagatagtgcagggagtttccatatacccctcacccactgccttttattaaagtcttatatgagtatgatacttttgttacaatgaatgaaccagtattggtacattattattatttaaagtccctattcattcatatatccttagttttacctaaggttctttttttctattccagggccccactcaggataccacattgcatttagttctcgtgtttcatttatctttgctatagaattttctcagattttccttgtttttcattaccttggcagttttgaggagtactgattaggtattttgtagaatgtctctcagttggaattttctgattgatttttcatgattagactgtagttagtgttttggggagagagaccacagagggtaatgtgccatttttccatcacactgtcaacatgactaaagatgttaaccttgatcacctgatcgaggtggatttggtcaggtttttccactataaatgtattatttttccttatttttattattttcatacctaccctttggaaggaagtcatgataaacaacccacacttaagagggtgttatactccatctccttgaaggcagagaatctacataaaatatttgcaattcttctccacagaagatttgcttattctccctcatttaattattcagcatttatgtatatcagtatggactcatggatatttattttatgcttaggttataatccactactgtcatactaatcgtgctgtgaaattgttccagctttggccattgggtactatttcttgtgtccctttgatacatccccacaattgtggtggttttgttttctgttttttgtttgttttgttttgatgcactttcatcctttctagcattacacaatacttgaggcttatcaacaatataactccttcctcatcatagattcagccatttctccaaggagcacacgttcctttcattggaaaatggtattaaaaaccaagatttgagcaataggtgtgttcattgtttttgggttgtcatttccttttggccttcttggctgacagagcaaggacatatatttgtgtataccaacctgtgtatgtacacatatctaacaatcaggaagcataaatagatagatgatagatagataagcattagttcatactgatattttcaaatctaactcattaccacatgggtcattctagcttcttcctcttgcttatctataatcttccactccaacagtgaaaaactaccatccatcatttgcttacttaattgttcaattccagtggtgctgttccatttatccttactgaagttgaaatacataaatataagctgaatttttctcaaacccttagaaaaattatttttcccccaaaatgttttttaccctgcaaactcttaagattttaaaatgtatttgtgtcccaaatgtttttctgtacataaaaattgatatagtcaactttatattgtttgcagttaacttgggacatggataatggaaattctcagataattccacaatttaagtttatctcttgctttcattatttctaatcagcatactctccatatgacaactatatctatgataagaaaattgacttctttacctataaatctctgtactttcttgacagacaccaaagaactacatgttgactgtatcttgctggtaacttaaggagaatagtaacttgtagtttccacctttagcaactggacattggccatactctgatttaccaagagagtccttgtaatcacaaaggaaagcagcgatttggcttcagatattaaagcaactttttttgacgtggctagatggttaggaacacactgaagaatagattttcagtaatgagccatactttcaatgaacgtcccaaggaaaacaattttaagatcttgcataaaatagttcatatgcctcaaatttgcatttaattcttacattaggttgaaagctcatgtagaaaacatgtaatgtaaaaattggagagcccaagaacacagtcatttccccttgggtgctaacaaaaatatactacccaacagtgcctttgtttgcagtctaatattttagaaggaaaaaaagaccccacaagcaaacatgttttttttttcttagtccagaaagaagaaatacagtgtgaacataatacttagggtagacaaaatggccaaaatagattaagttggcatcctttttagctgcagcttccttaaccttgtaccacaccctgacatcatcttcctacatggccacacctcatccccccatagccaaacattatttgcattcatcactcattcgtagatgccaaatcagacatggttcttgcccctatggagtttatgattaactggggaagacatgcattaatcaaattctctttctctctctctctcattctctcacacacacacacacacacacacacacacacacacacacacacacatgaaactgtgactggatcagatgctacgggagaaagacacacagggttcaaaaatctgtgaagggtttttttatctgttcagggaaaatcaggaatgtcttctctgaggatgagtagttcaggctgtgatttgcaggatcagtaagaattaaccaggaaaagaaggcaagagagagaaccttatgtggtgaatgaacaaatgtttaatataaaggcagcagaagagccagggtggaggcaggcacagaggtgggagataaggctctggtggccatgctaaagatccttacttcaccctgacagtgatggatcatcacaacatttccaagatcaagaatgcacttcccatctgtgtttcctctaaagtcaaaatatggcccatctttcaaaaggaaaattcaaatgttacccattcagtcttctaacactttcatttcctaatctaattagaaaagatcattctggctaagaggtggtatagtagtttaacccacccactcatatgcatgtgtttgtatttatatataaaattttattttcacatttctttttcctagtggcattagcaaaagcactcccagtttcattgagtctcttttaagttttgcttcccctctcctcctctcttcactatgctctgctgtcttggtgtctccccactactcatgtactctccctccatttctcaattctcatatgaggggaggtgccccagagggtgacgaaggacagtgtggcagaggacaggaggaagaaaacataggcacagctgcacttcagcattctgaagctgtaatcatcctgagcatctgtccagggacttccttgcccagttgctttgccatctgtacttgaagccaaggagcatcaggtgctttgcctttcctcaccaggcttacgccatagccttttcaccccactacccacacctcccagtgatgctgcaactatttctcctctgggctccatgcagtaactttctgggtttttttggttgttgttttagagcatttttgtagacagggttttactcagtcatccagactggagtacagtggtgcagttatggctcactgtagccttaacctcctgagctcaaggcatcctcccacttcagcctctcaagtaggtgggactacaggtgcaaaccaacatgcctggctcattttttatttttttgtaaatatagggtttttccatgttgcccaagttggttttgatctcccgggctcaagcgatcctcctggttcagcctcccaaaatgttgggattataggcattatccactgtgcctggcccagtaactttctaaatagtgtacaggcctccagtctcaccacctgtcccattctccttctctttccttctgcagagacctaagagccaagcggagcccatctccttcctacacattcttccagcctctttaggacctgatttcacaacctcatgtgccacaccccagctgcaccctcctggtggaaagtgttttgcagcttcttaaagatatcattctgcttcattcatcaacctttgtccatggtgttccttctgactagaatgtgtcccccaacccctttgcctggtgagaccctcctcttcctttgagacccatcagaaggcttgtctcttcttggaagcttctcaccccactccagtgctgcatccctagtttctgtgcatcccctgcaacctgtgcatcactttttcaaacatcgctcctcaagtagcattgtgcatgctgttttcttgcctttctcactcacacaaatgggagtttcctgggggccctttgtcatcaccacctgcctgactggatacactaacactcagcctacctgccacctacttggaaccttacaggtgtttctttgattaattaattaattcatgttttctcctcttctggtcagttcttccactttacctgtgcttgtttggatatgcagagctctagctggcgagagtgtccttctggctagattgtctcaccaaaaagagaatgggttttccccatccgggtgtctcttaattttttcttccactcgtgtttggacaaaattatttattgactggaaggaccacatggcaactcttcatggctttgaggccccttaatgagtgtccaagggagattctctctcacttccaagttcatggcagacatttacctacccagtcagcttgaactgagctcatagaagttttatttctggcttttgcggatcattttttatgctgttcctctcacctgaagctccctttctatctctccctagttggataatagtacacatattaaatgtgtaccttgtaccaagtatgctgagacctgcttataactaattttgcttgatcttcatgaatagtgttttgaaatagcatttttctatccctgcagataggaaaactagaaaacaaagaataagtaacttccccaagctcacatgacttgtaagtggcagagctgggatttgaacccaagcccctctgaagctaaagcctgtagagtacatgctcccttcctccacatcacactgcccctgcttgttcacactcaatgtgagaatccacttctcaagtttgtcttgcttattccaacctgttttgcaatgaatctctttcaacagctctatagttcctggcactcacttggcatccatcattttctatgttgtcatgtttggtatcttttcatgtatgtaatgtgcatctcttcttaggagtaagaccagaacttttctgctctgcagttttctccctgtgagggatggtgaaacttggtggctaagagcatggtttatacagacagacttcttaggtttatattctggctctcctctgtacttgctgtatcagctagggctgatgtcttcacttttttatgattccatttctacctctgtacaataaggcaaatatgaatacttacctcagagtgttgttgtgaagatggaatgaattaatggccataaagcacttacagctgtgtctggtacatagtgaccactcactaatggtcacttataattccttcacaacctgtaagggtcctttccacccaggtgatgtccctatgtctcaactgaatgactggttagggatatctttccatgggctactgtggctgcagataattgcattcttatttgagagttatgttaactagtgtgggcttttatttgcttctctctttctatcaatgagtcctgctgcttcaaccctgggttaactgaaatttgaaacctttttctactcaaattcctttgatgctgaaattcctctgcggtcacagctaagcactttgtgtggtaaccttctcttctgtcctcaggcctgctgagatcatctgctcagcagcatgtctgacacctgttgccacctcacccagccacttccttggtgacctggcaatgcccagaggggccctgccagcttggagccctgtggcaatgctgtttgattcagcaaactgatagccttctgacatcctttcttcattttagcagccaaatcacatgcaccttaatatttatcaatagctaagcaacaccggaaggaagtgagacagagcctctgggctagtcactatctctgattttacagaatggttaagccaggtgtaaaatatctcacaataacatgccctgttgtcctgaggattcaattccaccgagatataattaccatatgaggaagtgagaaatagggtttctttctaatacacagaaaatagaaaataagatgcttttcttggccactgttatcagtttcctgttaaggttctgctttgtttaaaacagtcctgttttgcttaaaaacaaactctaaggaatttttctaaaacatgactcaacctaactaggtatatatactgtactttaaagtgaacatatttgaaataattgtgagtgacaaagagacggaaaaacatagattttgaaactagcattattctaatgatttttatcccagtggtttatttggaaatgaatttccattcacaacatcttcatttgtcttctaattttcatgcaatttgaaagggttagtttccttacccacaggatcatcctggtcaaatctcaaaagattggctagggcattctgattttacaggcaaatttatattttgccgtttcaggaaataattccttcatggttatcttttataaagagcttatttgtataatatatacacatagtatatatcaaataaaagatctggtgttataaacataagaataagcaatttcccttttgtgataggaatatgaaattccttctggtagaggacgtttaagagcatgtccaaagaatggctaatcaatgaattctctcattttgtaaggagacacttagatgcatttctgaaaaaaacaaaacaaaacaaaacaaaacaaaaaacactttgggctttctctgtattcttcaagcatttctaaacatttattgacatatgcagtagagaaaaactggtatcaggaggaaggcagtaagtagccagcagtcacaaggtacaaagaataaaatgcatgcaaacatgtacagtattcactttcaggagttaatctacattttatttaatttttttttttttttttgacagcgtttcactcttgttgcccaggctggagtgcagtggtgcgatctcagctcactgcaacatctgcctcccgggttcaagcaattctccggcctcagcctcccaaatagctgggattacaggcatatgccaccatgcctggctaatttttttgaatttttagtagagacgggtttttgccatgttggtcaggctggtctcaaactcctgaccacaggtgatctgcctgcctcggctgcccaaagtgctggaattacaggcgtgagccaccatgcctggtcccttttaaaatattttaacactgagaccatattactgatgtactacttctttctaaaagtaattagaataaatgtacaccctcttctttaaactttgcatttttcaaatttccaaaaacaaaaactaattataagtaaatccataagcaaaacgctgttaattaccacttccaaaatctggaagcggtgacttgctttactaagacaagaaactttagacaggtgaatacttttaacaaggaacacacttaactttgtctaattgagcaaattacaaatcagagctagtagcttgttaattataagaatatctccattacttgaatacgtgtactagtcatggtaggcaaaataatactccaataacggacgaccccactgtggatctgagaaccccgcaggccagcagtctccatgtgattgccaaaagcaatgccgccatataaaccacaggtgtctaccttcaccatgacagaagaaagggttagagattccagaagtcacaattaaatgcttccaccccgaaaagtggatcatatttcattttccaaagcaatgcaactttgttaacctcaaagaggcagggaagtacaattttcctgtggggttggaagaagaaaactggaaattggtgaacagttttgaaatgtctgccataacttttaagtgaggaacttagtgttctcttactctgtcatgtttttaaatatctttttgattgaaatctttcaaggctttccagatccctgaagataaaatacaaactctccaacaagaccttttggccatcaggaacgcagcacctggctctctcactagtatcctctctctgtttgccatgtcccattaagactgtctccagaaacaatgaatttattgttgcctgtttcctgctagcttttccccgtatttacacagtttgctttatctgctgggattacccttccctgactatgctcaatctctatctcccttggcaattctcctccaggccccagacctgagaactggaccagtgctctgctctctcctctgagcttcaccacatcctgtgaaaacttgaacctaattcttactaggttttaatcaactgtttacctgtcttttctccccactaaagatgaaaagtcgcagagatagcggagaacaagaaccagatctcacagtcatggtgccaaaagagtatctaaccctgaattggagttcaatacatacttgttgaatgaatgagtgagtgaatgaatgaatgggttttttttgtgctttcatctacctgattggtagcatattcaggacagtatgtttttctcacctttttacatgctataagacataaaacagataatgcgtgtagtgggttcataataaaggtttaaataaactttacctacagttttatcactaggaatatatttctgatatctattacctttgaactttttatgccagattatgtttaaaaacatggtgtcactcgtaagccacatctgggactgattttcatggattgattaaactttacatttcttcggagtattcactgccaagcccctctggtgccatgtcctaaaccaaatatttcagaaacattgcaaaacaaggctgcccttgtgctttggaaacgctttcaaatgacatgccattcctttcaacttgaatctattaaagacttgaaattgtagcaatccattggactatatgtcaagaaactggtatttttaaagggtggcatgtttcttcatttatatgtaaattatttccatgtgctttggagagaaaaatggaaattttgtgaacgtacttagcccttaaagaatgtgattgatccttgatgatgtcgttccagacaacaacaaatacacaagaactctttttgagtgctgtaagaagcttctcaaaatttccagtataatcctaggaaaacatttttttttaatcttttctaatcaggaagtctttaaagtgtattttatcaaaatgttcagtattgtggaaacatactcatgagctattagctatagctgacttttgaggttataggtgaaaagttttcacatcaggaagtttcatgtagaacaaccagcgtcattcacgctcatatctgtggcttatatccaagagggccactggaggcttaggggctttgaagttaacagcatgaaacttctccaaaacaaacatttaatttttttctgttcgtttccttaaacaaagtccatgtaataaatgaaataattttgaagaacattgtaatgaatcccacataccagtgggtcccaaattactggaaatcataacatggctcatgtgaagaaagaattatactattttcaagctgttgtatgttaaactattatagtaagtagcataattggcatatattttaggccgtattttcaataaatcaatatttttgctcaaaaggcaaaatttaataatttaataatctcataaggtgaaggatggacaggtaccatgttaggaatttgacatgtgttgtttgctaatagactcatttaataaatgaagtaaatgatattaagcagtttcctcatgaccacagagcacagagccataatttgatttaaatatgagtatttctggctcatgctctttctctttctacctattgccattagtgaaggctgcatttagtttttttttcaagaagtgtctagcttacaattttgagcttcactacccccaacctcatacacacctcatgtggcttagagctatataaaatccatgttttttaaatacttctaaaattggacattcatattatgtgtatgatgttttacatatagtatgagtgcagtgaaagttagtttccttaagttttcctgaattcagctgttaccctagcatgactgcttcagcgaagagataagagcttctttgactttttccactggaatttttcatgccagaagaaattgaacatgtgagcctggtgtctggaagagtagcctggatttatggtatcagatgcacatttttaacaccttcagttttctctttaaaatatctcttcaatcccttacttttctctatttgtttcaacattaaaatatgttatttttcttcaaattgttggcattgacacctcttctacaattcccagtcatctgcatgctactgcttcagaggaatagtcttatatatagaaaatactttttttttctcagcacatttatatctaaacaagagaatgatatgcttttacccagttatctgcgtggctcacttccttcaaggcttcaccccaaagctacttcaatgtaacattttctatccattagattgagaactgcagttttaatccctaaccccactcccagactcccctgctaaagttttctctattgtccttgtcattttctgatataccttctaatttacctatttattttgtttaatattcatatcccttcgactggaatgtgaactccaacaaaagttcatatttattgtcttgttgtatctccatagctacagtagcacttaatatatagtagatgctcaggaaagatttataggaagaaaaaatgaaagcatggtttgcaataaatctaaatctataaacattccttttttagtagtattgttaaaccttacggttcctgtacaaccaggtgtatgccctctagagccaccaataatattccaatattaaatatacataattttataaacaggtgtgattttaatgtctctagacctttccaaccagaaaagctgaatccaggtactgctggtctttttccttccataggttctcattttccctgatgcagttattgccttttctgtttatactttcttccctttaggtgacttcacttacaaatataggaatgctgattcatgtttagcattgtgtggtttcagtatttattttctgtatttccacattgctattttagctcattctttaattaaataaaatgccttattctctcacagtatcagcaactaaaagaaggatacatcacctacagttgttagtgtgaactgcttatattaactcataggatatatattggtagacataaacctactgactaaattatttctgaagtatactctacaaaccatcattgtatttttacatttgacaaagtggaaaaaaaaaaacctggccacaatctttaaccctgcccagtgtctctggcttttaggcacacagccagtcggcaatggcggcaggggtggcatataaagattctagatctcaaaatgccaacctggccagaaaataaaactcactatgtgataccattggaacaagcttctataccaatgtagggggtgatggaggataatatacattgcaaatttatgtaaaaccagaccatgtggtatttccaatagttgttacaacattgcttaaaatgatataaatggccttatggataaaagtagaagtttaattttagaatagttcctattttaagactagatttagcaaaaatccttatggcatatgtttactcttggggaaccttgagagatagtgaacaagaaacgttagatcatagacttcttggctgcaaaaagtttatttatttcatcattttactcgtattccttttattatttgaaaagctttgtataaaggatttttagagatggcatttcattaaggttatatttattagaaaacaaacttgaataatttaaaattacaaaaggtaagtcattttatgtatttgcctacttgtttttgttttctccctgccaccctccctttcttcctttgtccttcccttcctcccttccatccttccatcctttctttattcatgccctgcctatttagaaaaggatttgcagtaagttacaaaaagtacaaagtcaataatttttttttaattcagaatgttaaaaagagaaaattgggtgaagagaaagtgaatatttcaataataagagtcatagtgcttcctctgaaggagcccagaaacccatctcatagttacgtggtggccaaacttagcaggaaaacaaaagaaatgctagacgagaagaacacaacatccatttctcaggaaagactaagttttcctcgtacagaaccctgaaatgtattctcccctgggatactgtttggataaacagtgagtgctgtaatagtcaatgtctttacccactgcttcacagcaaagcagaattcccaaggtaagaatgtgaccatgtaacctcattgcctcaccattgttctctccactctaatatttcagtactaaatgtgtgtgtctcttagggttgctgtgctgaataagtgagagtcacctggcacagcagacatctagtgtgtgctaaagaaatgtacagagaatgagagagaatttgaataaaaaatgtaaatagaatattatacagaagttaggaattaattcacaagtgtgtaagagatactctgtctcagatgtgcaggccactagtagtgcagtgtgacactcactgcctctcaagagaacttagtagtcagaaaagtgaagaaatgacatagcttttttacactatattatgtagaaagcttattttttaatgttaaccaagagcaaggtccataaactctaataccttccagaaagcacaaaagacattgagatacatttagagaaatagaggaaactgagctagatattcacgtgaaataggatcattccacatcttccagcaaataaattgaggtgaccaaggtcccagggagcacagatggtcatattctaatgaagctctggctcaaaaacacacaagctgaaaacaaggcgaggatgcttcataacaatgtccttttgtaggagaagtgaggattagtgatgagggtaggagtggagcaagagacagggattaatttgcatagccaccttggaatcccaaactgtcaatggtgtcagtgatgctgtttgcttgagtccctaaagggttgaatgaaagaagttaactagatacagagttcacagaaggtcaataatcttagctttccaacaagttggagatcggggtaaggagaagggcagaccttaagaaaagagttatacttattgccaggaaacagtgcttccttttgctgtttttccacaaacagatttacctttgccctatgcatttcatcttattttaaaaaacaaaacttttattttaggttcaggggtacatatggagattttttttaatataggtaagctcctgtcatgggggtttgttgtacagattatttcatcacccaggaactaagcctactacccaatagttattttctctggttgtctccctcataccaccctccaccctctggtaggccccagtatgctgatcctctttgtgtccatgtattttcattatttagctcccacttacaagtgagagcatacagtatttggttttgtgttcctgcgttagtttgctaaggataatgcctctagctccatccacgttttgcagaggacatgattgcatttttgtatgactgtatagcattccattatgtacctgtaccacattttctttatccaatctgccattgatgggcatttaggttgattccatgtctttgctatggtgaatagtgctacaacgaacatatgtgtgcatgtgcctttatggtagaattatttatattcctttgggtatatacccaggaatgggactgctgagttgaatggtagttctgtttttagccttttcagatgtcaccaagctgctttccacaatatttagtcttcttacacccccaacccccttggaagtttagaatggaagcacatttcttcagatgattattaactctttgctttttctgtttttactgcatcatttaaattatggtgtggaacatcgaaaagggccctaaagcctctattgtcaagtatgactgacctctcttggtaaagcgagacctagttctgactgagattcctccagtcgtttcatggttaactttccattcagtttcagttgtatttcattgtgtttcctgcccagtggagattcagcatagatgacacctaaggaaaaatgctagtcatagtgtgagaaatcatagccttctctttcaaatgcttttattcatattcctttggacttgattttagatattgctcgccaaatttagccatctttcttggtagacatttctgaaagtttagtgattaaaagcttagagtctagagttaaatggagtctagagttaaatagtctgggtgtggactctggcctggtcacttgccatctgtgggcaggccacttctttaagcctcaattttctcccctaaaaaatggagggggatgggggccatcatgatacttactttataaagtggttgtgaagattcaaggagaagttgatacatataaagttcttagaacagtgcctggcaggctgtaaacaactataaaaagttaatcattattttcagaaaaaaagttgagtcaaacctgaaacagtggtacaatgtcaagagcaggaactttgccttattaattgtgtcttcctaactctatggacttaggatctgagactctagttcctacaaactcatccatcctggggcctggcatatgggagctataaaccacatcagccctcctttgctctttttccttagggctgccctgaggaagaaagctaatgtgtataacatctagcattatgccaggtatgtggccagagctcaaaaaactatagctattattgtattatatactttgctctattttttatactcctggttaatgacggagagctctgtgaggggctgctagagggaaggttcaattattttagaagctttagttcttccacatttcactttgtaatgtttgccttgccttgtatttattaaacaatagtttactatactcgttcctaaaatattaagtatagcttattatgccctgttaatctttctcagtggcatacaataatttaaatatctgcttgaaaaatctcaccaagcattcattttaatgtggcttagaatgttatataatatgaaaaagtacgtgttctttcagaaattagttccaaagaactccctatatctagagacaggctgtgagaatggagaaagttgaggagtgtctctgttaggaatcttactactgcttttaaatttcatggaacacctattaaattgcttcgcagctaggttatgaggaaggggagccctgctcactcttttaaagttaaaagtgaaaagttacttgcgggtgattagggaaaaccatctcagaggagtggactgttggcatggagaccccacatataactcttgggggatggcaaaaacttgagagaggatgctttatttctcacctcctaaaatgcctttcccagctttctgtggtgagagagaatgagacagcagtcatacctaacagttggtgaaacagttctatgggagtgagggaaagtgaggggcctaggatgagtcagaaacatgtacatacggaaagggagagagacaatcctgattaaattgtgccttcttgcaaaaatatatatatttccacatttgatacaaagtgaagtatataaccttgacaaagcgatatctgtcagaaaaaaaattagaaaaattgctttaaataaacagtccttcaaaagatgtcaggcacagagactttctgagaaaatgtttccaaacttttaaggaacaaatagtatgttatataaattttctagagtttgtgaaaagaaaatcaacttttcaattcattctatcaagtagacctatttgcaataagaaggaagtccctcaaccaatcttacttttcggtagataaaatcttaaatacaacttggtaaattgaatcttgcattttgttaaaagattcatgctcatgtcaaataaggccgagtctgtaaatgtacatatagttaattttgatcaaatctggtcacagaatccatcatattaatatggtgaaagaaaaagcaatagacttgtattgacaggtgccacagtggcatttgactaaaacttaatatccatttgttgttagttttttttaaaaggatgcagtgaaatagcaacagaagaatatagtgtttatttcaatggtgaaaccaatttttaagtgtgagtcgtttctattaaagtcagcttagttataagcaataagacgtaacataatatttgtatgtaatatttgtttgggaagttgtatagttattgtcaagttattgttctagtacaacaacttgaaacataaaatataaaatgaaaactgactttatagctatgtgggtatttacctggaagagccaaaggaattagttgaaatgttattagaaatgattcagtaattcagataggtagccaaatacaaaattacatataagaaagctattagcttttttatagaaagtaataatcagttagatattataatgaaaaaaataaaatacctctttatttacttactttcttactgttgtccaggctggagtacaatggcacaatctcagctcactgcaaccttcacctcctaggctcaagcaattcttctgcttcagcctcttgagtagctaggtctacagacatccaccaccacccctggacagtttttcaaaaattttttgtagagatggggtcttgctgtgttccctaggctggtctcaaactcctgggctcaagcaatccgcctgtgttgacctctcaaggtgctgggattataggtgtgaaccactgtgcccggccaattctttttaaatagcacaagattctagtcacaaaaacatactacacctatatttatgagtgaaaataataagaaattagaagggtttttttggtattgttgtgaagaaaacaaaaatgtcttaactaatgctaaacaatccacaatattcattccactataggcaattccaatcacattttatttttgattttaataaagtatttcaaaaatcaagctaacatgggaaaatcaagaaaaagttgaaataaagcacagtgggtaaaggttggaaggatgtagaacacaccattccagagattatatcataaaaattacagtaacatatatcatgtaatatataatattgtaagaattaggacggtggctcaaatgaagaattagataaagttgatttggatagactatagatttcaaataagactcatttatgtatttgtgtgtgtgtgtgtgtgtgtgtgactgaagtagcattttattcaatgagaaaagggatgattattcaataaatggtgttgaaagcaacagctatcgtttgggaaaataatataaagttagattctttctttaaaccttatataaaaatatacattggatatatattttattaaatatttatttaaataaagatttcattaatatataatatataattttattaatgtaacaactaaaaagtagtttagttaaaattactaaaataaaataaaaatgagtatttaaatttcaacatagggaggatatttctaagcatatcactagagcgagaaagcatgaagaaaatgtctgatagatgtgtatacattaaggaatcaaatttttctacacatcaaaaacaccataaagaaaacgtaaaggcaaatgaaaagggtgggattctatttccagtgttactaaagagacattgactttaatgtcttaaaaatccttagaaatcgtccaggtggggtggctcacgcctataatcccagcactttgggaggctggggcaggtggatcacgaggtcaggagtttgagaccagcctgaccaacatggtgaaaccccgtctctactaaaaaatacaaaaattagccaggtgtggtggcacgtgcctgtaatcccagctacttaggaggctgagataggagaatctcttgaacctggtaggcggaggttgcagtaagctgagtcatgccactgcacttcagcctgggcgacagagtgagactctgtctcaaaaaaaaaaaaattcttagaaattaataaggaaaaaaatgacctttcttccaggaaaatgaacacaatccataagaaacacaattggtgagttacatgaataaaaccccaactttaaagaaatacaaattaaacaatagtgaactaacattttctctaaagagtattcaagattaaaaaacaaagtcaaaactagatgataacaaattcagcgtattgactaaagtcaggacattcttattcattagcaatgaaagtgaaagtttgagtagctttctagaagagaattcaagtcacactatgaaccaacaattttactttgaagaatttatcctaagaaaaaaattaagaatatgtgaaaagatttagttacatcaatgtttattatagtggaaaactgaaaatgtgccaagaaaaaaaatgagccaaatattcagcagcgggaattagcacaatataccttgatatgttatcaaggtaaatgtgtatgataggatactgatgcataaggataatttttaacatggtagattttcattatgttaaatgaaaaaataaaaaatacataaaatgagagcccatttttataataaaaaatatatagtcattcaaggaaaacatgtagacggacatcacaaaataccaacaacaggtatggttcaaagtgttataggtggttttcagcacatagattacccctagcaaagagacctctgtgacacttcgtttcttcatctgtgaaataaaggaatcatactagattagttctaaatgcttttagcaaaaatatttcataattctatgagtattgatggttaataaccttgagaaaattgttattatttattgaactttggagttagtagagtaaaaccaagtttatcctgagctatcccttgttttagttaaaattagttaaatttaacatcctgatgtttatttataaattgtgcatgtgtacatgtgtgtgtttgtgtgtatatatatagcgctttctcacaaatgcctgttttgctgtggagtgggttgggtgggtacagagtttcactgaaatgtatattcccctatagaattcttagagacacaaatatatcttgttaataggttatatatattttcatgtttcatctaccatttgaaaccctataaccatttgaaatcattcttggttttggtaggtttctttaattaacattcacattgagaaactataagagattcaacccttgaaaaagtccttttgctaaagagatttgcatgtgctctaaaaattggtggaaaatggttctgctctaatcaaacgaatgtcactctactcttatttctagctaacagtaaaactgcctggaaaatgataacgtacaacaaatatctcaagtggttatttagtaccttgttgtgatagtgaatgaaaaacacactcagttcactcagttttaatttgctgttgaacacttaacatttcacagtggctggctgtttggaggccatatacaatggtagaaaaagtagctttctaaaagtgctttgcctcattcttgcttaacctggcagacgtcatgaacttccaagagggaacatattttatttgccttataccaccagaggacttggccaattattgctatttatttaatgttggtgttgacatagtgcctttgccctgaggagctccaggtgctttataaaattagtcagcaattcacctcacagcctttacgccagagagtgaacattgaaaataataatgattcgtggaacctacagccacccctaactcctatttctgtttgcccagtgaaacagaacaaatatgcccagttccctcagagagctagcagaaaaaagttctagtggggtgtcatgggagtttctctcttgtgtaactaggtgaactcctgtaaggaaaatttgccatgcaccctgcagagctgagacttactattctctgttgtaggacccatactttccccagtaaggaactccattttttttcaggcctttgctcaaatatcactttcttaataagacctttcatgaccatctgtttttaaaaacaactaatcaaaacctatcctcaagtgcagactttctgtatcctcattcctgcattatttttctctgtagcacatgtagctattcagcacacttagatttttatttatttattaattaagggttgactccatcccaccagatcgtaagctttatgaaggtagaacatttgtctattctgttgagttatgaatctttagaacctaggtgggtgcctggtacctaatgggtgtgaaataagcatttgttgaatgaatgagcgaaggaatgaatgaataaataaattttccccagtggagcaacaagcaacagttggagtcccttgttgtcaatcaaatataaagatagcaaagagtaagtaagcaagagtgaacttgcatcatatcaagatttcttttatattccttaacattgaaaatattcatgtggtgaaatacagtattagagttttctcctttagttgcaaataatagaaactgaatttaagccgacttaaacaaaatagcagtttgcaggatcttgaaactcaaaaattcaaaggatacagctagttttaatggttgtgaggattgctgcaggccctctcatgatttgattgagcgtttgtctctgtctttctctttctctccttctgtctcactgtgtttctaagactttctctatgtggtagcaaagaaagctcagacagcacaaggctgcctgtagtaattcttgtgacatgagagcatacatctcccagtagttccaaggaaaacccagggctgacttgaaacgtgtgcacttggattacaggtcaaccttgagtcaattgtgactgactgaccaggcctctgtgtgtcccggttgtggaggtcagttccatcagtaggagggggattaatcaaaggaaaatcagaattctttatcagaataagaggagaagatgcatgacaagtattcagagatacactgtaaccagaaaaaatggtcatatgtgaagagtatctcattacaacagggaggaatgtagttctaagtcttttaaagttctgctttcctataatatcagatgaccacatatttcacagcataattgtgaaaatgatattttgaaaggaaaaaggaattcttatctgagataaaactgtcaaaaaagtcaaaatttggctgtgaaaaaagtgaacgtttacttgaggttgtcattacttatttccttcttatataattcatataattctatattattatgacattcatataggcaaggtgttaaattctaatttgattttataatttttcaaaagagacttagaatgtgctagaaatcctaaaaatttctgttccaactattggtatttgaattatgtatatactgcccctttttttcctataaaaaactgatagaagttcatagataaataaaattcacagataatgttacaaatttatttcaaatgttacttcttgcctttttctatgccaagatacttaacaaatacttcaaaattgaaagtatttttactccttattttatctattccacagaatagttagaggtagaggaagaattagataatatatttattaataagtcaacatcctattaatggatgaacatagaaccaactcataggcaacacagtcagaaaatcaaggtgtggcttggttggcatgaaagcataatgcccacaagaactactgttgttggttatgctgtactgtatgagaagggcatttctgacgttagctttgatactagccttttagtaactgagtaaagttagtgagtatactcacccagttcagattattaattcagtactaactcagtaatttggtgttactacatactgagatatccagctggattcaggatttgctcaattcaattagcaaatccagtgttaaggggaaaaagaagctttgtgggtaagcatttctaaattggtgtttttatgaagccacaatattctggtagttcgtcttttccttcagttctctgaagttgtaatcatttctaaattgttgctttctaggtaaaagatgtgagataggggaaaggaaggctttcttaggaattttttttctttcattgcccagttaaattggatttgtgatttatatccattcatcctattcatacccatcatatatctgtatacatctgtcatatatccatcctgttcatatccaatccaattcataagacttttccatatttttcgtgagattagatttttttagtgggtgagaagaaataaaaggcacataatattaacatgctcctggcattccagcaacgaataatgccatagcaattttataaagattaaaaataccctagctcactatgattttgatgagcgcaacgcacttttggctttgtgggtcccctcctcataaaaaatacaaaattatattttgtagctgcatttatgtaaagataaatataatctaaactgttttgtactcattttttcagattttaaaagagatttaacatttctatgagctcctaaaattatgagctctaggaatagtgcttactgtgctattggataaactaagctggcattgtcatagctaaattggttacattttaagctgtgaatgaaagggaatttggtaaaccaaacaactgttgtatgcttattgttcattccagtataaatatatttttgctattaacattagttattacaagtggaatacgaaggggtggactcagggtttggaaagagagttaatgcaagtgagtatttgactccatcaacaaaactttacaagtaaaatcctcaggttttgtgcctgtaatctttttacaggatttaatgctattttacttcgtcaacaatttttttttcttcaaagatttgtatttttaaatgactgatgctatgaaagaaaataccctcatgattatatttatattgtgaatttttacagtaggggcaaactagaatttttcatgcggagagcactttgggttttactcaatatagctcttcaaagttcttcaaagttcaaagtaaaaattgatgctagagtaattttcctgtaatctaggtgaaaagcccacatatcatttaacaaagtaaatgctcattcatatttaatacaaactcttttttcttctgttgaagctgacttttatccaatttttagtttccagttatctatggttttgggaaacagagctaatttggattcatgaattctgtaaacaagtatttcttgagaagctcctggttgtgaactacctagaatgaaactgggtaaactaatatcaacatccattcttttgccaaacatcactgataaactgcaacatttttttttttacgtgagtggtcttggaatcagacatttctgcattgaaaacccagcactgttgctgactggctgcatggcctgcatctacttctcacatttctgactgcctaccaggttccaggcactgttctaggcactgaagatgaaaagatgaataatatggagttcccatcttcaaagaagttacaattttaaggaagactggcaaataaaagttaccccacaaaataataaaaatacaggggtaaaactagggcatagttatattttggctggtctctttacctctgaggttcttttgctttttatgtaattggattttaacctcagaagactgtaaggttaaagatgataatgtataaaatcagtactctgagtaatgatcaaaattttctgttgccatccacacatttgagtgagatgtagtgagtgctagaaaataaagcagttcgtatcaaaaagggtgtgttgaaagaaataaactaatccttgagaaacactgtcatgcaatctcatatctagaaattgtgcctatgttctgtctataaattgatgaattggcagggtgttacatttaggacacacattgacactacatatgacatttgtaaaaacacttgctaattcagctaacagctcgcttctccccttctccccactactcactgtggagagagcttccagctaatagcttagaatctcccagactaaccaaccattgatggaaccaggtgctatgtgattgtaggaatttatttgttgctctgaatgttaactaaaagtaatgggcttcttattttgtccttttccttttgtgttatagacggcaaagactgtttctcatcagtctcatatagctaaattagatttatctctcatgctgactgattaaaagggttaaattctgggcacgttgtcccctgagtcctctgaaatccatgtcagaatagaagtgctcattaccagactcgatgaggagctccttttccagaacttctctctgctacactctaaggaccaagcacctctgcctaaattccaagcaaccatggcctgtggcagtcttggaacttttgccctctggcatgggtagaactagcgtcaattgggtaattcaatccctgagttccttcttcaatgaatgagagaatccaggaatgtgttgccagttgccttttccttgtacctagttttccttgctgcagaatgatgacagtctatttccacacctcccctcctgccactacaggatttatggtctgcatgccccagttgtgaagctggcatgtagcattttgttgccacaggcctgtgagtgtttagaagtttgtgtttgtatttccagggctacagtttgaatattgaaggaacaaacagcaaacaattcagaggtcaagctgtgactgcttcctcatttggagagcttattttatgtctgtatattctatactcagattcccacataacttgttttttccaccttcattgctttggttagatgctttcaagtgcattttttctctaagaaatctccatagaagagttgtttacttgaagtgatgggtgagcaaagtttgcctgacgtggaacctcagtaactttcccctaaggaaaagttctggcgtgtaggggtgggcgctcttccatccagacggatgggaacatagccaagcagccaggagacacattgacttgtgaccactgggaaggatgcctagccagaaaagtcccagcagctgggtctgttaatcttttctgaatgaaccagcaggcagttgacctctctaaacctgtcctggattcctttatatctttgtagtcacctttttaccccctcaagaattcccctataaagttgttcttaataagactctttttgcccacttccccctgaccttctgagttgaatatgaatttcactaattggtgaaagaaaccaccatgaccttgataaagccatttctactctggttcctcccttctaagaatttgttcattcaagcaagtatttgagtctaaatggatccacttggacattttaataattatcatgaacctcagtatccttaaagtgtggctaaaacaggctcaaaaaattcagatagtgtaatctactttctctctccctcctccagatttaagtggattaattcacttcactatgccagcacctgagtacagaataatttatttctgtgtcgtttcatgatgaaagtccagctggcattagctcaaattatgcagctggctattaattgaagaaaacttccctgtcactcctcagtcaaacatgatctgattcagcagatccttttcactctcatctcttctattctaccagtagaataaatgtaaataactttcacttggctctgcttgtcatggattgtaaattacctggcagcatgcagactgaccacattactgttttggaggcggcttgtttcagttgattagtatttctagaagagttttgcacatttcatctctgaggcctgaatgatgtccactagcaggaaatattgtagtctgccttttttcttacatactgtatactaaatttcaatctaatttcaacaagatgtcaaattctagcacctgtagggcaggtgttggtcttctatgaattgattatatgtttttctatcatactggatggtgtacaagcccaggttgtattttaaatagaatttcaagagagagatttgttctggaatttagaaatatatattatgtgccaaaattatttgatgagtgcattttgtaattcttaaaatacaaaactacttggcatgaagagatgctatagtatgttaacaattgtggaactttttcataagatgaaattctgtgcagaaatgagggagcagaattcttgtgggagtgctaaaatggttcatcaatttgatcctcacagcatatgagaattcaccaattatattactctctgaaaatatgtttcagtatcaagggcctctttttgcccttcctccatcccaatgtctgtactctctgtacagtgtgatcactgggtgctgcatgaccagtcattattatacgctcagccctgaaaatgaacttaagatggtaaaatcataccttgccaggatttgggtggctgtgagggattcagtaggattttagcaacagggactggaaaagaaatcagaacttggcagagaaaaaaatagcactaggatactagaagagacctgggagaactagcttgaccttagaggctggtcttgtgagtcatttgagaaatagtatcaaaagggcataagagggcccggcatagattaggctatttggggttacaggagatccaaagctagaaggggcaacaaaacattgtggtatgaggccatcctaatttgaacatcaggcacaggatctagtgtccatgaagtagatctcagggaatgggcagcctgagaagaagagtagatcatgcagaagccagcagtcacccctagatccagatctgagtgtcatgacctagatgcaattaaaatccttataatgggtcccaccctggcaggattctttcaggaactcaggctgagcctgaagtgagtagattcagctgaagggaaggtaaagaactataagttgatagacttgcaaaatggagaggctgcttttaggaaaccattgataatagtatcaatcccattgataatatatgtgattgcccttttataaggccatgtgctttctgcacaattatgataaagtatttagccaaacttgtattccctatataaagggggaggagatagtatcccatggggaattccttcccatattataaactggtagacaacttaagcaaaaatgtttttactcatatgaacactgttgaagtataaagccaggtatttaagtcatgataggtgtttatttactttgaacatttgccagaagtttgatgatgggtatatttgtagactgggtgttagaggttgttatattctaaaaagatatcttctgattaattttcttcatttataaaaacaatctattttgataacatttaatttatgaactttggtgtcatgttacactttatacattttggttgtacattccctgtaatgcttacagagacagccagtcaggcaataattgctacatactgagcgccttctattttctgagtactattgtaaattatagagataaagcagtgaaccagacagagtctccatcctaaaagagcctagtagaggatgggaactgatgtagtatcttgtaattgtcacagcatggtacacttgcttcttcagatgccattattaagggcgtcgtttctttaaattctgagatccctaactcagcttatgccagaactgatgagaattagaccttcctaaggtcttctttcttcctaaaatgaatattgaaataaatctataagataaaaataatcctaccaccaagccccaattaagactggatttttaacttgctcttctcagcacaatgacacaacagaggacacagaggttaatggaatgtctttggagcaaaggagatttcaaaaccaccagtttgttagatttgatgatcagctctgcaaaatgtttaaagaagatttcttactcatatcttataagttaagactataaatggtttaaatgggggaggatgtgacaggattgaaaatcttccccttcctttgtggctatgagaattcacactgagcaacagggaagagaaggaactagaacttggaatgagcctgtgtgtgggccctcattgttccaggatttacaaagggctacgctgtcatcatattaaataaatggctcctgctccttgtgccagcttaattgccaccttggctcccgaacaaagaaatcacaattgaggcaaaacatgttttgctattgaaggcaaaacctccttagagcaattttggggttgtttttccatttaattttttaacttgcagaaatagccctctttttttctgttttttggttttttttgttttcgtttttttaaatgatgtacacttgtgctgttaagtttcagcatggaatacaggctttatgtatttaggcagtaatgctgagttagatattggtaccaaaaaaaatgaaagaaagagagcaagaggacagcacatgtcaaaatgcctgatagaactgcatggacagaactaaatgtgcttccctactgttagttacacgtataagtcacatctcaaagcgtgttccccaggttagcatcaatatcacctaggaacttgctggagatgcaaattatctggttccatctcaggcctaatgaatcagaaactctaggtggaagggagcagtccagcaacctgcattttacaaagacctccaggacactctgatgtatgctagagtctgagatccactggtgcaaagaataccataggacagatgtacactaactaaactagttctgtttctcttaaaatgactttgacaatatttagaattttgaagaatggtatagaaattcatagttcgtgtgtgtgtgtttgtgtatgtatgtgtctgtgtgtgtgtgttttagcagaattctattttagaaaatatggggtagacttttatttagttttgttatttttgttatttttgaaaaattaagaggtaagcagagaagtatagccagctacttccataattttgtaggaataatgaagtttattctagcagaaagttatatcttatggaataacttctctaatattctctctagacatatattcttttttgaggcaggaacacaaaagaaaattggcttcttcatcaagttcaaagaaatggtgttttaattatgtagagaagtaatttcattttctcagagaaatgggtagacagatattagtaatttaactctcttcttaagtaatggctgctatagctcttaccaacactgaaagaagtagagtcaaatagatttaaatctggctagtgattagaattttttggggggtagggtgggtgaaactgtattgcagggaggtacgttgtaataagacagctagttattatgcactaccctccagttctttgacatgatagctaagggcatagacaaaaatctgaactctgtggtctttgtacatatctgcattcagattaattcacttaacaaatatttgtggagcacctaccatgggcttatcactataatgggctaaggttgtacagtgagcaagatactcacatatgtgattcttgtgaagccagaggtccagtggtaaagctagatgagtaaacatcaattacaatgaagtataatcacttccaggatgaggcagaatataggatgttatgcaagcagtcatccttgattttaggactgggtgatgtggagttcatgaatggttcatggaagaggcactaaagcctacagtgtgaatagaaattagcaagatgatggacagggcaggcagagacaagagcatatgcaaagttggaaagtggagagttcttgacattaccacattactgaatgtgcatatggtggagtttagggtgcagagaggacagttgcacatgctctggagaatgatgggagatgaagctgagaataatacaaggaagagaaaataacaggccttgctatccatgttaagaattccggacttcattccaacaaaagggaaagtctttgaggttgtagtatttggctgtgctgtagagagtgtattggggaaggacagtgctgaaggaaaggagaccagctgggacattgctgcaataattcagaccggtactcatggcttggaccagcagcaaggggagaatgaaaagtaaagagatttaggaaatagctacttaggaaatagattgaacgggaactggcattcaatatgtgtgacagcgaggaacaggaagacacttgggacaactagaagaacagtaggccattcactgagtttggggtccagcaagaggagtgagtttgagggtgaaattatgtgttccatttgggctagtagggtctgagaagtctgtggttgtccaagtagagatgtccaataaactgtggaaaatgcaatcccttaggcctctttattctcataaatacttctcatgctttttcacagcagaggctaaagccaaaaaacttttacagttgttgattactcccatagtgattgggccactactctcgatgtcagttttaagtgttatgtgaattttagcgttgcagaattttagcattgcagaatttttctgcacaaaatcctagaaagcaacttagtttactcagtgaaacctgcctgccaactaacaagacctattatttttcagttgggattttacttcaacagtggaaactatgacacaacagggatggtctaaccccaatttgagcactctgttctcattttcattaggaatcacttccctgtaatcataaaatggaaatatatttactgtagacatgttgtttggtgaaagcaacactaaaaatgagtagatgaatataacagctacaggataaaataagagttcccatttttaaaaagaaggactatgtttacaacacagctctccttaatgttatagtgttattatagcagtgaattttcaaataaaatatttaaattggaatgttagaagttttcttctatcatatcaaataagtggaaggccacctgtttgatgattacatattcaagtgatagttctcaaaaactaaagaaaaatctcatataaattataaatgattctgcaaagtttcacctaacattttctccatacttatgaagcttctgaagttattttacttttgagaagccacagacagaaaaattaatataaatgagataaatttcaactagccttgagaataaagagagcaaggatagtcatcaacacaattaagaatgrccaaatcctattaatgttttcaaattaccaaattagaaaagttaggaagcatgaataatttatttctgacaacatattctttttaatatctgcattactttggtckgctaaggagataaacctactcatgtgacataccatatgtaaacattttcctaattaataactggaaagcttctatgtgaaatacaaactttctgctcatacataatgtagactacaggcagacagttaagagttggtcaaagctgtcaaagcttgttttatggaaatctcatcttcttttcctgtgctctttatcctagtccaggtcctctgaattcttttactctacagtacttagctaatacagtgtttatcctcacattctatcatagcttttatattaaccactcagcaaaatatgtgtgcatgcacatacacgcacaaccatacctatatttaatcatctagtaaactatattaaatcttctgtaaacttcagataagcctgtttaaattgggggtgggtcgtattgtagcataccaaatggttcatataccaagtatatatttgtcatactatgtggaacagtattatatttaaaactgaagtcttatttcatgtaggttgtaccaaatttgtggtggtaaacattgtatttaggtcattcacaaagagtacagaaatacagattagccatatttttctatagtgccattcagtgtaataggtacacaatacatctcatattaaagaaaaaagagtcttttcaaaagcctgtaagggtctgaataaaggtcttagaaatgtgtcataacagctgaaatctaagagatttggaaaaagtgggagaagttaaatattgcaaatgcatagagctaagacttcttcattgaaagttgggtagttccaacattcatgtggaaaatctttaaaagtagccaaaaggtaattttttttttttttttttttttttttttttttgaggctgagtcttgctctgttgcccaggctggagtgcagtggcatgatctcggctcactgcaagctcygcctcccgggttcacgccattctcttgcctcagcctcccgagtagctgggactacaggtgcctgccaccacgcctggctaattttttgtatttttagtagagacagggtttcatcgtgttagccaggatggtctcaatctcctgaccttgtgattcacccatctcggcctcccaaagtgctgggattacaggcgtgagccaccatgcctggcccaaaagctaattttttaaattttccagatagaacttcatgtgtatttgatatattccattttcgtgtatccaatattaccaaatccatggtatttttattctttgttttagatattctaatcatttcacagcactttcattacacatctgcccagatttcctgttgctaaatttcagacactattctttaagtcttggaagagatcaactttttcagcacaacccatcccaaacaatgtaatgttactgtgctatattaagacaacacatgtgctgatctttttcaggcatttccagaatttttattgaatgtcaagtatgtgcaaggcaaagtccatctagcgattttaggatttccaggacctgccatttataaacttcctggaagaaaaattaaccccctcaaaatgggtgttgacatccagtttgcctttatagctcctctgatgccttttaaaaactatatttacccatcttatgtcaataaaaaggatgtatttattataagttgtggcagatagtgttttatagacaattttatagcccacgtgttaaaggtaaaagcaaagaaattatgctactttgctgtattttcccagtgatttatgtaagtatttattccctgtaggaaaaagttgaaacactattgttgacaacagggcccaaataggtatcagcttgatgtactttatcacatattatctttttgtttttgcatcatccctaggaggtaaatatgtaacactttggtttcattagcatcacaacagattattaggcaaatcaacagaatgaaattaaagttatattatctaattgaaaaaagccttcacttatattttcaagcattagttcttatccactttcaatcacctggggaactttaaaaaatctgatgcctgggccagacacccagaaaaatgacatcagactttctggggacaggacccaggtgactgtatttttctaaatgtctttcatgactccgctgctttagaggttcacagacttccacttaaagaactgctggttaagaaatgcatccctacttgctcggactcccagggatatcacttttcacctgttcctatcatttagaaaaaaatgatttgaatcagctagatacatgatagaggaccccccccccacacacacacacacaccaatctaagcacaaaattatcttgttgtcctcaatagtttgcatggataagtaatgcagaataagcatcatacccaatattaataaatacttaacaagaagcccaagattttaccttgtttcctattttttccttcagccatcacattcaaacctggcccaaaggtttctcacattctggcctccatcaccaccactactgctttggcctggccttttgtcaagctagaaattgccagaatttcctgacaacaggctctgtaagattcagtttagagcttacactttggctggagttcatcttcctaaaaagagactgtgatatgtaaatccacaacctgaaatctcattggctctccattgcctaccaataacccaaaatcctctactcaggaagtcctggatggtgtaactccattgcacacaggttcatcccacaaggcctcttggtaatggggtactttcatgtgcatactattctgctgctcttgtggaaagagtcttcaaccccattctgtataccctggacactcacctgagacccagctgaaacagaccttgtcatctcggaccctgcccttggttctgttgaaagaattagccaccagatccttgaggctgtctcaggacttttgcttcacctttattataacaattggaatgcaggcaaaatagtgtttccagttactaaaataaaactatagaccatacaatatgtttgttttgtgcttatttaactcgcaggggaaaatacccatatttttaagactctggatttaaaaaatctggttgattatatgagaatattgttggcttgtctgtttgattttgctttttttgggttgccaataaaattttagagcaagaaaatcaatctctggaaaatatgtctaaaatgcaagagaaaattccaagaaaataagctagatttcaattaacatgtgaaaagcatttcttaatatatacaatgtttattttacatggataatttatgtaagttattgaataaataatacttttaggtttgggttttaggggaggttttaggtttgggttgcagcagaggctttttcagctgattcaaatatctagttttcaaaatactctgcccacatgatttttagatatgacttagccttaattgctgactcagattttcaccttttaaaaagcaattgtgctttttcatatacactatcaaacaagattataagatattttaaggtaagaaagtaaaagggcatccactaatgatcatcagaatcacctggaagggccaataagccacacattaccaggccccttccccaaaatttctaattctgtagatctgtggtacagcctccaattttttgcttctaataagaccccaagtgacactaatgctgctagtctggagaccacactttgagaatcactgcattaaattaacaattttattggttgagttttcaccacagtgtgcatatctgttgactaacaatgaatagctttgttgtcgccaaacactgtaatgtttccaaatatccatatgtagtcacaggcccagagaaacaaaccacatctatattaagactgttttgttgttgtttgacccccccaccctttagtgttttaattacatcaatcctggagaaaaataactgttttctaatttgggcattacagatttgctaaggcaatagaaaattctatcttaaacctttagatttttagtcttctagtaaatataagcatatgagttccaagcaaattctgagttttaaaaaatttaataaaattgacaaatgttttcaataaaattggagaggcccatttccttgtacaaatattctaaaaatagatgataaaagttctaagtgccattttttgaaagatcagcaaaataattctacaagtatttgtgggcatgttatcttttctatgatactggttataaacttaagttatatgaagacagtgtgttagttaaattatgttctagtcctaccttaaggaaataaaaacaataaggctcttagggcctttcttctgcaccactgcagtacttgctaacatgttttaataacatgtagctgagaatgataaactctaggcagcagggtggcttggagatactaatggaaatgcccagtcaaaaagagcctggactagactgaggtctgaagactccaaataactttctgttatcccaccatcttctcagatggtccaatcatgctacactcagtctagggcaatgaccctgaggaatggtatgtttggcaaaaaagaaaccaaagaaggctactgccatgctttaagattttcccatatatctttttcagcatcttgaatggggtttctgaaagtctgaggagtgaactgtgaccaaaatggctgatattttgagctcaaagaaacttaaatttttaggtaaggatactaagaccgacttaaaaagtatagtatcaataatttacatttctttagctaagaattttcagaccacttcagtgcagatcacattgactgattctctaaaccactctatgaagtgggcaaagtgatggtctcatttttcaaatgaggactaaggtttatttaattcaagtgattaactcttcaaacatctagtagaggctagccagatgcattggctcacatctgtaatctcaacactttgggaggctgaggcaggcagatcccctgaggtcaggagttcaagaccagcctggccaacatggtgaaaacccatctctactaaaaatacagaaattagctgggcatggtggtggcaggtgcctgtaatcccagctactcaggaggctgaggcaggagaatggcttgaacccaggaggcagaggttacagtgtgctgagataacgccacggcactctagcctgggtgagagtgatattccatctcaaaaatcaaaacaaaaaaatctagtaagggtctatgtctagcgcctgcacttcaaatatgtgtttgtcatgacatcattagcccaatccaattttctttcattaattttctgaaataaatattttttgagtttatactatataccaggtgctgctgtaagtgctaggaatataacagtgaatcaaacaaataaaaatctgtgaccttttggagcttacattccaatgaatataggcaaaataatagcccctgcaaagagctccactgcctaatccctggactaaatgaacattacctcacatgcaaaaaaagattttgcagatttgattaggggcacagaccttgagatgtagtgtccgtattagcccagtgggcccaatctaatcacacaagtccttctaagcaaagacttttccctggttaggttagagagagatgtgataacagaaaaagggtcagacagatgcaactttgttggctttggaaatgaaagaagggggcctggagccaaggaatgtggacagctagaaagggcaaggaagcagattctcccttagcccactcagaaaggaatgcaaccctgaagacaccttgattttagcccattgaggcctgtgttggacttctgacctacagaactataaaatgatacattttaattgttaaatcactaagtttctgataatttgttacaccagcagcagaaaactacagaaaagatagacaatattcaagaaaaataagtaaaaaatatatgttggatagtgataagtgctaaggaaaaaagtcagggaatgacataggaagttatcagtagggatgcaattttgaatagggtagccctccaggttaacatttgcatagactcaaaggagatgaagggcaagaacatttcagatgaaggaaacaggaggctaaaagctgagactaggacaatgatcagcctgactagattctgaatatcaccattaaaagagcagtttctacttcagaatatatgtacaagcttcacctgggaaccatgtgtgatgatttaggatgaagtttcaaaactccacagatgacattcttatttttctataagcaaacagtcttgcccaaataacatcatttactttttcatgtttgctggagagttcattaagaaattcaatacaccgtattcaaagaagatgaattcttacaatcacttagaatttggtctaaggcaaacaattgaggatgttcagactgagtctttttggaccatctactcaacatcattatcaaccaacagcttataccccttcaaagggatctcaaattatatttgatcctgagttgttgctataataaatttagagctggagaaaaatagtcattgtaattattttgttattagagaccggcttacatatgctaaataaataaaaacaaaatgagagttaattctatgtgaaattcaccatcaattttgatgaaatttcctattgatacttccaagtacagtaggcctttcgtatccatgggttccacatctgtgtattcaatccaatttttttttttaataatatggttgtgtatatactgaacatgtacagacttttcttgtcattccctaaacagtacagcataataactattgacataacatttacattgtattaggtataagtaatctggagatgctttaaagtatattgatgtgtgtaggttatatacaaatactatgtcattttatataaggaacttgagcatccatggattttggtatctgcctgaagacctggaaccaatccccaaagatcctgagggaccactgtaatctaattgaggccaagtttcatgggtttgtatcctcttaagtacctgggggaaaaaactgtctgatttttttttaagttttagtataccatatattttaattttcaaagaaaggaaaacagaaattttatgatctgtgtcaatagaagtgttaatatataaagcaaagaaatgcctaggtgaatattggcctagtaataaacattctgcaatggtgcttcatgggaaatacgccttaccttgctactcaaaatgtgatccatgaaccagcagtatgaatatcacctggacttggtagaaattcttggaccccaccctgacctagtgggtaaccatctgcattgcagtaagatcccaggtgattcatatgtgttttcaatgtgagaagcacagcactggggccttacccggggccctccttaggaaacacaccaagtattgcatgttttttacatcctgacaggtccatatgaactcacatttttccgaatacagtgcactagcatatctatcatattttgaaaagctattttcatcaagggagcttagtatctggtgctcacgagatacctacagagaagtagacagtgttatgcttttgagaatttatcaaaccttttggtcatataatgtttttatttcaaaaccttaaattggtcaacatatttttaaatatttaatagttgagggatgaagaggatagaagtttaattagttcaaaggaaggtaaattgggaaggaaacaaacttttttgttgaatcagaattttcaggatgaaaaaagacaccagtgccctgtggttcagtgctaacacagctatgatgtgactcttcaaaggtcaatgcttgtgcccctattgctgcacatccttctccttgtcagtgttgatgtgtcattggctggctctgtgtcattggcttggtcttgctttcactgaactttggcctccgtgaaacttctaagtagcattgctcctacctgtgaatcttggaaacacacagggcaagtgaaattccattttcttcctttctttctttttttaatgattaatagacaatttatttaagcaagatccttatagtcatcrttgccagacttaatatgagatgttaaatgttccatccaattttccttcctggataagtttttctttcctatccctgtcagttttgaaaacataataccagaagaagaggggcccaattccacacagagctcccaagagtgagttttaggagtgagtctgaaattagaatagacatttgctgatcttgcataggtccaacgaattaaggcaagatcttcgatgagcccttggtggttagagttggttgttgtactgaagcaggtactcttgtttcagctgggctcttatggccaaccgttcagcttgcatctgccagccttccagagatatgtcatatttggctgagtcgagggtcaagggcagagtggccaggtgcgatggagtaaactttgggaatgacattttggtgacccagcacacaactgcctgaaattccattttcatgtgacacttttgtatctgtaaccatcaggtctgttccctatgttttctattccttaacttggctaccattataccatcacatctctttccttttctagtgactccccattagactagctcctatctcataacctccttttgtaatttaatggcccaaagattagcaaattccagaaattcctaaagtaatccaattagctcagaacatcatagagacttttttttttctttgcctcatcctggggttatttatcaatgaaagtgactttagattagatagacactggctgccacatcgtatcgttgtgacatcctgcacttaactaaaagggcttgacttaggcaccatctccttctctcttggcagctgctcagttagatgtttttgttttaaccaaagggcaggacttcaaatgtgaccctatttaactccatctggttatattttgaccttatgctctttttatatcctgattctgtcatccattctcttagctgtccttcccagcttgatgtaatagtattttcccaaactacacccttttccataataaagattgtcactcctccctcaagcttccttaagcaagctttatcatatgtctgataggatctctgtttctgattgtactcagtatagatttgtttcctggcacacatgtatgcactatgtcacttaatcacagtgcccctattagattacaaactcctgtcaccaagggttttgttccctcttttcaaagcagaacttaaaagaattttgcttacctttaagcgtgcagttcacatcattgactttaactggatggtggttgatggctgatggtcaactaacaaaaaaggagttgaggagttgaggtttcagatataacagaaggatacttaagacttttaaggaataaaaaactaatttttcttagcacaatggttcagatgaaagtaagggtgcatcagagaaggctgtcattggtttatttgttatattcctagctcatggtgattgtatgttagccaaatatcttgcatttgattttaaaacaaatcagaagtagatgactcagaaatgttgacaataaaattatggacaagccccttgctacagcagctcttattaattaaatatctgagacagcagaattaaaagagaagaaagtgatatacaatttggaaggtttggaaagctggccataaaattatttctttcagctggagataccttacctacttataatatataaaatttttgaagaaataagaataggtcttattttactttgcagtgaaggcttgaaatatttgaaagttcactttattgcaataggattaagtacatcaaacttcatccattcttatctctctcaaatattaggagtataactttcaactgaacttctttgcctgctgtaatatactgttctatagtgatattttaaaatgaatactttgtgaacatagtactagaaaaaggatagtgttttgaatattttaatagccttacagggttaaaaaaggatcttataaaaagtatgtttagtaccattcaatttttacaaatttatgcatttgcttattcatatatgtaaatttaaaatttacatataagcttatactcagaaaaagataaatgttgtaaacacacttgcatgcacacacacaccataacaaccaccatgccattcagtggttatttcagggtaagtaggattgcagaaacttttacatattcacgttttgcctatattttctgttataagcttttattttggcatgagaagaaaaaaattttaaaatttcccaaaaacattctttgtaatagtcaaaaattaaaatgaacagtgtctatcaataggagaatggctacaccaacaaaaaaagtcaagtaagaaataaaattggccaggcctggtggctcatgcctgtaatcccagcactttgggaggccaaggctggtggattgcttgagcccaggagtttgagaccagcctgggcaatatggcaaaacaccatatgtacaaaaaatacaaaaaaaatagccaagcatggtggcatgcacatgtagtcctagctactagggtggctgaggtgggaggattgcttgagcctgagaggcagaggttgctgtgagccgagatcacgccactgcattctagccagggagatagaacaagaccctgtctcaaaaaaataaaattaagcaatgggaaaagattcctcttgctattttaaatgttgatcaacattcaaattttcagtggttttaggtaacaagacatgtcaacctcctgaaacagtaattgttgtagataataagaatatatatgagtttggctttacctgattttaaaagtggagagaaaagctgaattgaagcaagcatacaattattttctaaacatatcctctccagtttcagtgttttttaatcaaaccaccaggaatggtgcagcagacaatgccagtccatgtctcccccttcatggtcccttagttgtcattaatgggtgactgcagagaaccataggcatttgaggacttaacagagatatgttttatattgagagtggacataagctcctcattgcctcattgtggtttgcacttcaaactgcagcgtgtactttttctaagctctgtggtctgccttcctaggactgcttgccctgtactgttatttcagaatgtttatctagtgaggagtgctgcattgctccattgtgcatcacagggcacaggaagcaatggtatgacatttttgctgcacatctatttttgattattctcaaaagatgaaaatgtttatcactgcaggggtgtattagtccattttcatgctgctataaagaactacttgagatatggtaatttataaaggaaacaggtttcattgactcacagttctgcatgactggaaaggcttcaggaaacttaaaatcatggtggaatgggaaacaaacacgttcttattcacatggcggcaggggagggaagtgcagaggaaagggggaaaaagccccttatagaactatcagatctcctgagaagtcactcactatcatgagaacagcagggggatctgctcccatgatctaatcacctcccatgaggttccctcccccaaaacatggggattacaatttggattacaattcgagatttgggtgaggacacagagccagaccatatcattccaccttttgccctccaaaatctcatctttctcacatttcaaaacacaattatgccttcccaagagtctcccaaagtcttgactcatttcagcgttaactcaatagtccaagtccaaagtctcgactgagacaaggcaagtcccttctgtctatgagcctgtaaaagcaaaagcaagttaattacttcctagatacagtggaggcacaggtattgggtaaatacactcattccaaatgggagaaattgtccagaacaaaggggcaacaggccccatgcaagtccaaaatccaatagggcagtcattaaacattaaagttccaaaatgatctcctttgactccatgtcttacatccagttcatgctgttgcaagagttgggtccccaccactttggcagctccacccctgtggtttttcagggtacagtcccctcctggctgctttcatgggctggcattgagtgtctgcagcttttccaggtgcgcagtgcaagctgttggtggagctaccattctggggtctggaggatggttgccctcttctcacagctccactatgcagtgccccagtgggaattctgtgtgggagcttgcaccccacattttcctactgcactgccccagcagaggttctccacgagggccccgtccctgcagcaggctcttgcctggacatccaggcatttccatacatcctctgaaatctaggtggaggttcccaaacctcagttcttgacttctgtgcacctgcaggcccaacaccacgtgtaagctgctaagccttgaggcttggaccttctgaagcaatggcctgagctgtatgttggccccttttagccatggttgggactgaagcagctgggatgcagggttgcacagagcagggggaccctaggcccaccccacaaaataaagtctttcctcctaggcctccaggcctgtaataggaggggctgctgtgaagtcgtctaacaggctctagagacattttcctcattgtcttggtgattaacatttggcatctcattacttatgcaaatttctgcagctggctggaattttcccccagaaaatgggtttttctttgctattacatcatcaggctgcaaatttctcaaacttttatggtgtgcttccttttgaattttcttccaccagatactctaaatcatctctctaattcacagttccacagatctctacggcagggacaaaatgccaccagcctctttgctaaagcatagcaagagtgacctttactccagtttctaacaagttcctcatctccatctcagaccaactcagcctggacgtcattgttcgtatcactataagcattttggtcaaagccattcaacaagtttctcagacgtcccaaactttcccacatctttctgtcttctgagccctccaagtctctaggaagttgcacattttcccacattttcctgtcttcttctgaggcctccaaactgttccaacctctgcctgttacccagttccaaagtcgcttccacattttcaggtatctgcagtagtgccacactactctcagtaccaactgactgtactaatctgttctcacactgctataaagaactgcctgagactgggtaatttgtaaaggaaacgggtttaattgacttacagttccacatgactggggaggcttcaggaaacttacaaacatggtggaaggggaagcaaacatgttcttcttcacatggcagcaggagagagaagtgcagagtggaggggaaaaagccccttataaaaccattagagctccagagaagtcactcactattattagaacagcatgggggaatctgttccatgatctaatcacctcccatgaggactttcccccaaaacgtggggattacaatttgcattacaattcaagttgagatttggttgaggacacagaaccagaccatatcaaagagtttgctttgacaaaaggaagtgtatctttttatttacttatttacaaagcagcttattaaagttattaaatagttttcaaaggggcagcttttttttctactttctgtattagtaagcaaccatctatgattgtaatacaactgaggtctcccaagagagaatgtagcacaaaacaaggtgtgctatctaaacctgtaagaaatgttgtgcagtgaaccaactccagcacagatatggagctctctcagaaacaacataggaaatttagatatgtgaaattcaaatagaaatagaaaactcaatttagagtttagtttgcgtaatatcttagaaatgttttcatggttcaaagctgatatttgacaattgtgttagatctataaaaattcacaaaacatccctataattttcagatacaaaatgctaataaggattttaaagttcaatgtggaccacagggcttctgcttttgcaggtgtaccttcatttacatcctttcagttgaggaagggtgggtgtttgagagcaaaatgtatgtataaggtaagaagaaaagagaaatgagagagagaagcagaagatagtgagccatcaataatgatattagttggcattcatttcaaaagccaaccaccccaatttagaggatttgcatttaggactaattaaattataagctaattgagcagggactgagttaagcctactgatagtgcttcataaatattcatattaacaataatacaagatgttccttttcaaggctaaaaactttttctaaatggtgtatacaacttgtgagtcttggtaagtcaatgttgttgcattcctgaatttttctatcccttttaaggataattctaactcaagtgaaccgaaattttccctgtagcagtagaggtcctctgaaaattgaggaagctctccatgtgtaatgctctgaaaatggcagacatttcagagtcacattctgtatatcattcatgtgaaatggcataggcaattttactcctcaagattctttgcccagaattcgcaatttaataagaacaagtattatgaattgttgaagattcttccagctctcttggaaataaagggtcttctcaaattgtagctttggtacattaatagttactctgggggcctaaatgagttagttaatgtgcagcttaaacatctgaggcacacccagaagtaactcaggactgaggaattcaccttcccttgctactcaattgccgtttgtgtaaaatagtggacagtgacactgtttgtgtgcagctagcaactgtctctaagtcttgggtttgttggagcataaagtgcactccagtgccctgagtatacctgtaagggtatttaccatgattcataagacttgttttaaaattcctctccaaataaacaccctcttaaatttaattttcctcatatttctatgtggttatttatagttcaagaacaagtatttaaaatatttaaatgatagccattcaattaactattccaaattttagtttttttcaccaaggagctgagctgattatcaaatatgctttatgtgaactctgttttgtttaaagtgtactgtattttttaaatttgtgaacatgggaaattatacaatgttctataataatttcaaacctgagttttttttaaatctcaatgaaagctgtaccttatctgaaatgtaaattagtgtaaaaaccctttcattctcaataattgtcggctactatctttttatcttcatgttcatcaatagtaaacattcaaccttcaacggttaacaaatattaagtgtttaccatgtaccagacacttttctacattctggggtgacagatctagaattacaagtgtatcaaatattataacagacaggtggaaggtgctacaggatcaaataagaagaggacataaacttaactgtagagatgggttggggagggaggaagaagttagtgttagaacaggcaacttttaaagaattaaccaggaagttatgcaatttggggtaaagtggggaaagagtgtcagggaaatgaggttgaaacagataatataagatttgctatttattcaaaaatagtttagaggccagtaattggctgggagaagaatggtgcacagatgggcaagtgttgacctgcaaggccaattagaaagctgtgtctataagtaaaggcaagagatgaggatgacctggattaggaaacaaaaaaatcctctcttttacctgcaaaaatagctgttgactttgtctcccttccatacaagacttggggtctccacgtttccagcaagagactgggcagttatacatctgtttttatttttactctgacctgactgctttatgcaagatgggccaagtctcccttatacatcaggaatgcactgatgtaaagacaagatatctgctcctccagccacctttcttccaggtctatctgccttaattcctcttcccccattctcagtggtgcatcattctctactgctgtcctagtcctgcctcagttttccattagttttattttgcagcagagattttttttttttttagtgatctcctattgttccttaatcacccttgaaatatacctaattaacccaagtaaaccttcatgatgcatgtctcttcatcctaggagtataaatgatccttgtatatctataggaacgtttctattccagtctttgaaattgaggaatttcatatacattatatatatatacacacatacagacacacacacacaacgtgtatatatgtgtatatatgtgtatatatgtatatgtgtgtgtgtatgtgtgcatatacatattccattagttatgaacagctcttttttatctcttaaaagcagcaaaataaaatattgacattattcagtgaattgatagttgaaatgtaaggatttcagaatgaaagttatgtagtaaatcctagccctttccgaatcctgatttcctaaatctaacctatatggaatttcttttttttttaataaaggttccatgaaacttggcctctttcctatcatcttaaatcgttctcctcttatacttctcttagttctacttctttcacgtgaaatccattctaatgtgaacctcggtttctctgagaggtgcctcaccacaatgcccatgcctttctgcacttcccacgtagatcttcttgccccaaatacctactgtgagccttctttcctctgtgcctttcattattccactcatctgaaattcagtcgcaccaactttttaagcacctttatcaggcactgtggtcagtaaggtttacagatgaataaggcatgattgccagtcactgacaacaaatttggggcagggagaacagccccatccccataaatggtctcatgtttcttttgtttgtttgtttgttttgatagaatctcactctgttgcccaggctggagtgcagtggtgtgatcttggctcaccataacctctgcctcccaggttcaagcaattctcctgccttagccttcgaagtagctgggactacaggtgctggccaccacacccagctaatttttttgtattatgagtagagatgaggtttaccatgttggccaggctggtctcaaactcctgacctcaagtgatccccccacctcagcctccaaaaaagctgggattacaggtgtgaggtaccgtgtcctgcccataaacagcctcatttataaaccataaatacataagtgctgagatagagatttgtgtgtgtgtgtgtgtatttggggggtggtggatacactttgcccaacaaatccaatattgtttactacttcctgtgcttcccacatgactgttctctcatctttctcttaaattaatggaaataccctcctaaccagttttccgactggtgcttttgcccatccagtctaatctcatagcagagttattctacaaaaacagtaattagttcacatcgtgttgctctctgctcaaagccatccaatggcatgccatctagagtcaaagtcaaattcttgctatgtctgttaaacttctacatgatctatgtctaccgcccctttcaagtgacctggatctgacatcttctcaaaccactgtccgcctcacccactcacttctccactctgacttcactggtgttccctgaatgtgccaagcatgttctgcatcacagcctttgcactacctgttcccagtgctgggaattctcttcctctaagtatctggatggctggttccatcctgcccttcagatcatcgctcatatgttactttagcagtaatcctttcctattcatgctttttcttccaccttgacgttccctgctgtatttttattcatagcacctatgacctactgtatcctttgttatctgtttattgactgctttcatccaacaagaatgtaagctctataagggcaagggcttttttctgttttttcactgttgtatcctctgtgcctagaatggtacctgtcacataataggtgctcaatgaatatttgctaaaggatggaaggaagaagggaagaggaggaaggagggagagagagaaagaggaaagttgaaagaagaaaggaagggaagaaagatggtagggaagaaggaaggacagcagaaagtctcatgttggctttactaagtctctaacacttattaacacctgctttgtcttataaacagagataacaccggcctgtagcctagtgcctttcgaaggcaacattatctggatagaaactaataaggttgttctgtttatgctgcatttatggcaagagttactgactttccatttatagttgtgatataaagtttcttctttaaatgaagacattttatttcagtttttaaaaaactagtctattacagaatttttaaaattaataatagtatataggggatgcagaaacaacaaaaatcatgatgtagaaatgtggatatggcagaatcatgaagctggtagtcgaatgcctgaattggggataagtgaccccttcagccatgaaacattccctgactattgccatcttcccctctttcattcctgttgtttattcgactcctgtacactatcatgggttgaactgaaaccatttggtattgctcactgttgttttgggtgttttagttctatcttcctaaattgatataagatccttgatgtgagtgctcatgtcctgcccccctcctcctgggcagccaccatagtgcacagcccagcactgacaaaacagaacattaaggatgtttgcttgttgtattcatcatgactcagctacacaataagacatgaggttaaatagtgtgcagacagtaaaaatactcgagcgtgctttatttttttttttagcaaaagaaatacaatagcaaacatcattttgccttgcaaactggcaaaatgaaatcactatttttgccactggtgtaaattttatacacacacacacacacacacacacacacaaacacacaagtacatacatatatacttattcaatctggtaggataaattaatcactaggacaaaaccatgagttaataggagccaaattccagcacatccaattggaatgcttgagaattaaacctgctaaaaatactgactggaataggaagacattcataaaacgattaggcacattttagtggaagtcagcaacaacaaataattaattgatttaactaataaatttagatatttaaattgtcaaggaattctttgttcttctgttttataaatggtattagcattatcttttttactggaaactttaaaggtgtaaaatactgtcaagagcaaaagcaacttagattgcctgtaatgaccattacattgacaccattttttgcagtatgatttgctattaaatgtgaataacgtgaagaacaataacactcctagatcacctgctatgaaccaggcactgctctaaatagctcaggtattttaactcatgtaactgctacaaccctatgaaatatatcctcctttcagcttcattttactagtgaggaaaccaaagctcaatgaggctctgttaagttaccccaggtcacacagctagtaagtgtctgagctgggtgttagtgcacagtgatctagcacccaagtccatatacttaaacactacctttgaatgctgctctgtaccctatataaggaagctgtggcccaaataggcaaacctgtgacaaacgaatcctagagtctaaaacaaaggttgaaaggtgactgtaaaagtaggcatttgatctttaaaaaccaggtgaatttgacctgccattcttgacggcattagtaaacattacatttcttataatttacattaaaaatctaatacttcgtttacaaaaaaagactttcaaagaatatgcatgcattttatgcaaggttaaagaagttttcagtgctggctagtgaaatgggggttagatgccctgtctatactacatgtttaatcaatgtaatcttaaaatgagatgaccttgtagccaagcattttttctttcctttataagcaatattaactatattaaatcaagaaagctaatagtttttcgtatttctcaataaccattaagttcaaacattggaagagtttaatattttacatgaaaaatccacaggcaataattttaagtgacttagaaaatatttaccgtattttaaccttaaatgactgtgtatgtgtgtgtgtgtgcctatgtgtgtgcctatgtatgtgtatgtatgtttataatctagtagttctcaaggagtattggagaaagaatatgtgatcacatgtagtttataaaagctctcgtgttttttgaaagacaaattttttgtcaatctagtggtaacatgatactaattttttaattaattttaatttccctgataatacatttaagccttaaaaatattgttagtgattcatgtttctttttctataaaaattatttctaagccttcctcaaatttcttccagactcttttttctgattgatttttaagaattttaaaaatattctgcaatttctcttgatcacaacaagtgttggaaatatcttctcccgaagaaaagaatgattcttaaaaaaatactttagtagcagtttttttctatgaaaaaattagaagtagctttttcttggcagcgttttcttctagagcaatagggaggaaaacagaaagctgtagactgttatcttcgtccatacatatgttagtgctggaactcaactccaaaaactttgttcctttgaaaatcatatccctccagaattggtggagtggtgatggtgtggtgttgaaggcctattgccaggactgagaaggaaaagctaaagaaagagggaaaaaaaatccagagaaagtgactgcctggggaggagggataggcaagagaccaaacatcgattctaaagggaatcttgcaaatgctctggcaagtctatgtatgggaacatcatttgcctagaagatgctcccctttactccctttttccctattgggctggtttagaggtcaataaacttaattattttacatctagtaatgtcccagatgatataaaatgtcattgttttcattctatcatatagttcatgaatcacagttaaaataatgtttcccttctaaaaatttttcaagttttttatttcaccgtaaagttcttttacatatggaattgaattctgtgtgcagtgtgagaagaaatccacttttgtatgtttcccatatggctaactagttatttccacaccatcgattgactgatccatcatttttccactgactggtagtgttacctttgacacgcatcagtacagttggtctgctttacctttctagctataattgtggcgtatccctctattaattgcctcctttagtgttattcagtgcattttatacattttgttacgaagatcttatacattttttattcacatccactgtagacttctgttgctattacaaaatggcaacaattttcagttatattttccaaatgcttgctgcagctatatccaaatctaataatttttatatcgaacaaatatttagaaacttttcaaactttgatgtacttttaatgatgtttcttctgattcttttaggtattctttgtagacaatcgtatcatctgtgaataacaaaaatttgtttcttccattccaatttttatactctatattttataccactttttaaaatgatttattgactggctgcacggatgcttctctgactttaaaatatgaatccctgagggatccttttaaaaggaagatcttggttcagtggtaggtcaggcactgagaacctgcatttctaacaagctcccaggtgacagtgaggacacttgtccaaaaaaagcaatgctttcaaaagactgttaaatagaaatggagagaacaagcattctttacttgtgtctacaattaaagagcatgcttccacatttcaccatcaagattagatatctttgattagttttggtaacttcctcctattccaaatttgccatacatttttatcgtgaatggttgtttagttgaataattttctgtggtttttcccctttaatctcttaacattgtgaattattagaacatctcatgtttaaagcctttcatgccatatgcacacaaatatacatacacatataggtacatagaaaaatatgtatttattgctgctttatttgctaacatttggtttagactttttaacctgtctttatgattcagattggcttcatgtaatccttgaggattcttaatgtttttaagtttcattatagaatgaattaggtgtataccctcttattctaagctctttacatggaactcacttttatactagtttttgagacacactctgttataatcagcatcttactgatgaagaaacagaggtacatggaggttaaataactagcccaaagtcacatagctagtaagtgataaaattcgttggtttttgtctgttgaacaatgaagagaatggtttcctaaaatttgttttgtttagtcactgattcactagttcaatcttaaatgtaattcagtagttcagtcctagaaacagttttcaaagccactaaaaacagatttagatcctagtgaggtaaaaataaataaataaataaaatgattttgaggccactgagaaaagtggggcccctagtaatttgtaacagcctcccactccctatcaagaggaggtggtagaccgagattctaaattgaaaaatgaaggccgggtgcggtggctcacgcctgtaatcccagtgctttgggaggccgaggcgggtggatcacaaaatcaggagatcgagaccatcctggctaacacggtgaaaccctgtctctactaaaaatacgaaaaattagctgggcgtggtggcgggcgcctgtagtcccagctactcgggaggctgaggcaggagaatggtgtgaacccgggaggcggagcatgcagtgagccgagatcgcaccactgcactccagcctgagcgacagagcaagactctgtctcaaaaaaaaaaaaaaagaaaaatgtaaacacttaccttggctttgtcacttaatggcctatgtcaaaagcttaatttgcttcatgatttcatttaaagtgtatacctttcactgaattctgcagtgatttagcataattcactaataggtatatgcctatcattttcataacctttcaggaaatcatttggccctagtatactgactttcgctctaagttttcctttatacctgaatctcaatctctcttactgagatttaaacctgtatctttacagcgaacttcagaaacatgggaaagactgtcattatccttcatgaaatcctgtggtccacaatgaagcgtgtttattttgttaccactcagtttgatttctttcacattgtttcatggtttttcttaaattcttacttactctttagcatgtggaagtactgcctttcaatgtaagacattttactttaacaattcaaagagatttttttttctatgctacgtagatattagggtacagaagaaaatacaggagacattagcctgctcatgaaggttatgaactgcacaaatcatgtagtcttttacaggtttaattgcctcatttgtgaaaggaggttgaactaggcagtctctcacctctctgtcagctctgatgttaaaggattttgttcatccttacaatgttttctcattaaagctcaaatatgcataattaatgtaatgcattattttttaggagattgaaaacctatcatctagatgatgtgctaacctgatttttgtcaatatcattcttgattctgtttttatatctcaatatgatacagagttgcaaaatatttctaagctttgatcattcttttgggcatattcctgtagataattttgaaatgatatatttagtggagaaaatgtaaaaataatattaaatccttctaagaaaaaacaaatgtattaataattaaatagctgcactgtaaaccaatattcactattcaatcattgattaccaaaaagatagcggcatgaaaaacctctatatttttatctcatggtttaagatgaatattttgcccttcatatttatcattttttaaaaaagaacacatttagactttgaaaacgatatgtaatgtgcttctacattaatgggaaaaacaacctaaactgtatagtcaaataaaatattggaatcttataccttgacatatttttttaaactagacatcatctaatttcttttcaaaaatagaaataactttttatctttgtccttggtattactttatacttgtctgttcagtggcattgctattctgtgataagattttattacagaaaatgtctctatctgtacttgaacattagtctaattttttttacaaatgttccttgatttgacatctgtcaactgatttctgagttaatattatcttttcagtttccattcctttgaaataggaaatccaatattaaacccttcaataaagatgaaccctacatctgtatatccagaattttggtttgataaaaccaaaactgataagttcaatggggttaaacattcttgaagtaaaattggagagacatttgaacacctttaccccaagttcattcatctattcatcttctctttaattaagtctgtttgaaaaaagctttcattgattgttagcttcctggaatatgtcctaaatatcataaggcatatggagctccatgactcctcagaaaagagcacgttgattgatcagtgattctgcattagacatgcgtgctacaagtttgatttgactgacccagagaggaatataaccttaatggaaacagagaaaatatcttcatgtcacttggcttagcctgctcctttcaggggataagttgccacagcattcaaaagggtgtagtctatgaatatttttagaatctctaaagatgaggattttacaacatggtattcaacagcagagtttaatttttcttttttctcacttaacactgagtcattaacagttgagacattttacatgactgtgagcagttgagcacaaaaaccagatgttaagattgggtacagtcaaaagtttagacatccacacctgtgttatgttttgtttatgttctggagcgccaaactttgttacatctttgaacccacttcagacctcaaattaccacattttttaaaagcctcattagaatggtatcatatagtgctgaatccatagaacagaaattcagtgttttcagattgctaatcatgtatgaaagtttctgaaatcatattgtccaacgggctgtaacttggcctattcttctatctcctaaggaaattgaattgactggacactgttcattataaagatacagcaggtacttccttgtaacctgtgctcttctatatattttgaaaattattattcattttcatatttatcaaagtgaaaaaagcaacatagctactctacttatatagctcattttaaggaattttatacttgttttctagttttgtgaatttcttatgaattcacaaaaataatgtaaaagctaatggtctgtccctgctaccattgtgcatattagtcaacaagtacaagtagaatatttaaaagatttattagttcctaattatatatagaaaaagactttgaaaattacttaagccatgattctaccaagatgtaaccacttttattttcttttttccttcccaatgttgactggttatatgcatattaatggagctataataataattgtatactttttatcttactttctaaaccacattattattccttaaatattgctctttcttctgacacagtcttctcatgtatcattttgattactacataatattctgacttaatcgaaactttttgtattttttgatgttcaagcttcttttctcatttgttactattagaaatgatggctctagaaacatccttagaagttttccttatcttttaaattaaactgcttttattttactaaaataatctttaagaactgggattactaggtcaaattctacaatcatatttgtgtcccctgtcattttgtaaccaaaaagatgctatttgagtaagacctgcttgataacttacttattaatcttattttattttgtcttgcatcacaaatgagtcaaattctatttttctctaattaaatcttacgatcaccggtacttggatttaagttttacagtgaaacagaaagaattttaaaaaacggtttaagtaggagaaattatattttcagatctccttgcctatctgctggaatcactagtgccaccacttttcactggtgctccttttgcttcacttaactaaagagttttcactcagacccttatgatttctccaagatgcattacattttcctgctgtttccatatacctgggaaatagttctttcatttacatcttctgtctctatatttttccaggtaagtcatgcctcctttaaatttttactattttttatctatgtctgtctatctctactaagatgttctctacctttgtttctgtctacctaactagctagctacctacctacctatctggaactctacctctgtctcttatactatgcccattcttctcttttctctttaaaatttttttgttgctgttttctcttttcctctatttctgtatctcgtttgtgtcaaattgccagactacttaattagtatattcatgtttgtttttgaatttctattactgtattttctcttattagtatttgtttttataattattattttcctttacttttttgtgtttattttcctattttttctaagtaagttgctttgtgcattgagttttagcctttatttctaatacagtgatttaattctattgctttagtgacaatcccatatatttgatgcataatatatttattattaagttttaagtattttataaatccctttgatttcttctctcactcaagtgttatttagaagtactttttaaatgttttccaaaggaatgagtttttaaataaatacattgttattaatttctaattttgttcatctttaacagaagagatatttgtatagtacctattctttgacattgttgaaactaaactgaaaatattagttaattcatgaacactggattaattataattataatattcaaaaaatataattatattcaaaagtataattatatataagtttatataatttataaagtttataatataaacctatattttatatatttataacttaatataaaattataaagtttataatataattataatattcaaaaatattaatttaggcttcctatttatcctgctttctaatgtttgttttcttttcacgtcttttctggcattattttagatcaaagtgatttcctcccttttctcattgtatttttccttctagtttgtaagttttaaactctaattctattattttaataataaccctaaaaaattttccaaatatgtaacttaaggctgaagttaaataatatctttacccttttactgtcctcctgagaaaatacaaaagaatagatttttgttctcttcatatttgtattacattgtagacattatcattattattatagttgtagtaagtcatctttggtgaacattttctaacacattttccattttctttgctcagcattttttttttttttgcatctgagaccatcctttttatttaaaaatgtcttttagaagtttctctagtgactctccaatagtagggaattctcttcatgtgtggttttcttactatcttattttgtgcttagacttggaaggtagttttgttgtgtatgcattactgggttgacaactacttctcttcacctctttaaatacgatactaccttgtcttttgagaaatcacttttcagtctgaccagtgttacttttttctttttgggtgctttgaaattcttatttttatctttgttgttgtgcaatttcactctaatgaatccagaagttgagtttttcaaaagtttacttaaaatgtattggtattcctaaatatgagtgttggtgtcttttatttattttggaaaattcttagctattattgtttcaaatattgcctcgttgccattccttttaatctatcccaaccctagtaagacttatgttggccccactctgtcattcacctatcttaaccttgctttcatattttccacttctttttctactgcattctgaatgtttcattcatatatgttttctggctcactaattcaaccttcagtagagtctaatttgttgtttcacctgtttgttgagtttctaatttcagttattagacattcaattttagaagttctattggtctttattctaaatatgtgtgttgatttttattggtcttttgctcatttactaaattttttatcatttctttaaacagcttaaatatttttttttattttagttccttgatagttccaatatctgtaatcttgttggtctacctgtgcagtttattccactgattgtctctcaggcaagtttattttttttatgcattttctatatttttttacatatgtgagctcatactctttagtattttatctctggaaattatctgtgttgaaagtgtatttttcgaaagaggatttgcttataatttaagtaactgcatgtctgctaactatagatttactttaaatgaaatgttcaacttttgggccacgcaaatatccaatgccatattacatatcgcaagtatacacttgtgattagaaatttttgaaagaaatatttgttttaaatatgctgcctgaaaccaagacaagtcttgttctgcatgaaagattgtagcatgcctagttataggtattgacttttgggtataagactttctgtgaagtctgaatgtgagttctttctctgtttaggccccttgtttagattcttgccctggaacccaaagaattggtaaatgccttcaggaaaaaaacaaaaaaacaaacaaagcaaaaaacaattctagtacttagttatccctgtgggaccaagctttcttaatttcaagcctcaaaaacttttaatttaatgatttaaagcaatcatccagtataattttagagcaaattttgttgaattataccataagaggaaaaagcacacaaacctaaatgtaaaatgtggtaaatttccatgaagataacatacccatgtaagcagcaattagattaataggcagtatattgctaagctgtagaagcccccatttgtgtacctttcagattctgcccccaccccagagtaactactattgtgatttctaagataatattcatattatttaccaaagagagtgtgttctttgttctctagcttcttttcctcaacactgtatttggaaaagttatctttcttttttcttttcttttctttttttttttttttttttgagacagggtattgctctgtcacccaggctgtagtacagtaccatagtcataactcattgcagcctcaaactcctgggctcaagcagtcctcctgcctcagcctcccaagtagctaggactacagacatatgacaccacacctggctaattttattttatttttttgtatagactgggtctcgctttgttgcccaggctagactcaaactcctgggcctaaaggaacatttgtctttatatatgtagttgtagttcattttcatcttcatacaaatatgttataaattatttattcattttattgttttgttttgttttgttttgttttgtttgagaaagagttccactgctttgcccaggctggagtgcagtggcacgaactcgtctcactgcagcctctgcctccagggttcaagcaattctcctgcctcagcctcctaagtagttgggtctacaggcacctgccactacacacggctaatttttgtatttttagtagagatggggttttgccattttggccgggctggtcacgaactcctcatctcaaatgatccacctgcctcagtctgccaaagtgctgggattacaggtgtgagccactgtgcctggcccattttattattggtaaatatttgttttatttttatttgaaactattacaaatcatgctgctatgaacattactgtatacatctttttgtataatgcatatatatttctgatgggtatatagccagaagtggaattgcttgattatgaggcatgcattttttgaagactgacagacagttttctcaagtagcttcttcaatttagattccaaccaatattctctattttctaagagctccacattcttgtcaacacttcgtattatctttttcattttaaccattctagttgagtaatatgtagtgttatttcattgtaattttaattttcacttcactgatgtctagtgattctgtgcattaatttttttttctggacttttgaagtgttctgtatgggaaactattcctccatttagctagctattttgctggaaattattgtataaaatatcatctcataatttaacagtatattccttcttctcttcaaatttttattaaaataatttttcagtactcttgaagtcaacttttaatttgtccaacctgtctttgagctccccctgctgttttctatttaaactatatacctgttgattatgcataattttctttaaaatgatggattcttagccaataagctattttaagcagaagcattttttttgccaaagactaagggtataaaataaatttaaatgctaactcaggatataagaattattaaaattaatgcttgaaaactagtatgttacatatgggaaatctgtataccttcataatttcactgtgaatctcactcctctaaaaaatgaagtcttgaaaagttagtattttaaaatacttaccttacttgtaatgtgaaaccatttatattaatttagcaaatcaatgtttcaaattattaacaactagacaaactactgagccatatgttaggtatattgtaagcatgttgaagtcaacaacatgacttctacactttctactttctcacggttcccagaatatctattttgacataattattgaaaaaaaattaaaagcatttattccattgtcttgctacatctaaattcatggtgttatgtttctttagggcaatggagctgaaatgaataatggataccatgtagtgtttttatatatttcatctatgagctatgacagatatctccctacattccagcagaaaaaaaaatgtgcttctttcctaagcttgccagctataaaggcctattagacattcagagattatcaggaagcaaaaagcttcatagtcttaacaacgtaaatctgaagtcttagaatgagttcattagaatatagacattgaatatgaggtaagtctgagttgaaattctatctctgacaactgctggatctgtttttggtttccaatagtaaaatggcactaataatgatatatgcaaaatgtaaaatgcttagcacagtgcttggcacatagtagattctaagctgtagtttaaacagctattgtgctatgaataagccatacgttgacattttccctcttgagaatgtgctatttaagtgtagaaaacctgctttcccctgtccgtgtgaatttccttaacattcatcttggaaatgataccacatacccttatattgatgcactgcaagaggccaatctaatgtaggcataaaaagagtaatctggtaatctgctcttctcagcaccctctgctaataatgctgtttgaacaaattctagaaagactgttgatgccagagccaactcagaattaggcaggtgaatgttttcaacttctgctaataataacatcagttctgtactctcctctgggttctttttgctgtattaaagctgcagttcccttaggttagcttctatgcataacctgggaatgcatattttagctttttacttccctcccaaagaaaggagcagaagaggagaaccaaatagccaagatctagaagatgaaactgttgtatccattgtgtggattcagataagcctccacccaaaatatggttcaaatgttaagactaatgagcagccctacacttctctctctctcactttcacacacacacatacacaaacacacgcgcacgcacacacacacacacacacacacacacacacacacacatatacccctaccaagaaagtatgaaagtatgtattacttataaaattatgaggtttttctggggagagcagagcaggcctcccaagaaggtctgaagtagcttgagagagcagggggaaaatgactggtttgagattttatgacttttagtgggtgaggccatgctgagagttttgtgtgggtggactctggtgtggtttgaatttcccaccatcaccaaaggagagaacacatgggctttcttaacagttttcccaaatgtaggacagaggggaagagagaggtataacactttaaagctatcagcaatgacacatcaaaaaatggacatagattttttattacagaaattaaattgtatgagaacagaaatgaatcccggtgctacacagctgatgtttcctaggaatgagaactagggtaacttttttaaagcacgtgtttatattgattggtacatactagttagccaaatttaactgggttgagatggtggactttccttttgaacctcagttatgcaaattgtaagaattgtgtttccttcaaattactcaaaataatattgaatttcttacaaatgcaaaatgaattgtggcttaatgtgcatatgtatataacagatactttgttcaactatattatgaaatactatagtatgtaactttcttaaataaacaggatgacaaatcagtgttaggattcaaatgggccctatattactctgtatctctcataggccaagtgttaattctggtacacatgacatttagcacatgctattacatttattgattgcatatttttatctgttatcttttggttcattctacaaggattcttcaaaagaaatcaagtaatcctagaccccaatatataaaagaaaccaactcatcctagacccaatatataaaagtaaatgacattttgttcttgtcttaataagttcacagtatttcaggaaacatgggaatacagaataacagataagaaatattataagacttctagtagagaaatatgcttaaaatcatatgtatgttcctttacacctaagaacctttagatataaatgcattttaactgttctggagagttccaactccaaaatagcctttgttcatatcaagaaagtaaaccaccttctatttcaggtgggcttactcaccatacctggggccacattactgtcccagctcactgaaaggtcataatccaggatgaaaccaaacttgaaaattatagtgaaacacagtagaataatttagaagcatatactttgatgtttttagaaagtaaggaaataaaactttaattgaacttggaataaactcagttctgagcattccattctactctgcagttgtcatttatagacagctgtggatcataatacctatagactagatatcgttatctacttatttatattaatgacaggatatccctgggcaaacagcatcaccactgtactgtgtattcttggttgtcatgggaacctttgctgtgaaccagcagtgagagcacttccattgaataaagctgcctctggatagccatgagttgcatgaagttattttactaattttatttgccttttacttgaaagcataagtttctgaggatgtaattacagtttcccctatatttctacagaagtagttatagatgatggacctcctgaacttttatcactttgccatactctgtaaaattacctaagagctccagagcatgaaattaacactcaggaatattgtagcctaaccttttttgctactctgaataatactgaattgaagggtcttccacagcaagccctctttaaattatgctttctgatgctttacctaaggctatacacttgtctttagattcttctagattattttctcctaatacagaacttagcatttaaatgacaattttaaaaattgagatcaactcttcaaaagaaatcaagtaaaagcaatttcagcaaaaaaaaaaaaaaagccttctaatctcctacaaaacacctctatcctatcaagatattgtgattgagaattagaaatagtgtggaatcagatgttagtttgtcctttccttttcactggaatttctccatgctttaatttttatatcaagaaaaacaattcttgcaatattccctaaggagagttttacaaaaaaagagataaaacaaactacacacacacacacacacacacacacacacacacacacacactaccttaaggaataaagaaattatctgagtggaaaataatggtgctttcaattttcctaattgaattaaaataattatctaagtctttttgatcttgtcccaaagtgaataaaatgtctttttttaaatttatgtttcattagatatatctccatcttttcagtattcaccccaagttttaattgggtagaagaatatggaagaaattcctattgctcagacaccatgtttaaagctttctgaatgtgatctaatacctccattggttggaggtaattaaacagagatctgttcttttaaacaactatttgagtgctttaaatctgaaagtcatgtcataaatgtcagacctctttctctttgctttaatcatctcagaaagacttatctgttaatggaacatctgcatataggtattttgttgaccacaggtgttccacataagtttaatctacctattagttatatgttcatgctattgaggacctttcaataataaactttactgagtgcttactctcttctaagagtaatgcactatgctaggagacaggagggatataaaggtaaagaaaccatggcatgaatctttagggagattataatttagtggagaacactagtgaaaggaggcaaaggaattaatagaacaagacagtttctctgagtctccaaaggcactgtaaaaattcctggggaaactgcaagcaagagcaaaatgttagctatcataaacattctcatgcatcttcaggttttatcttcatccataaatttacccattaaatttagacattctactatctattccacttgacattccaattagcagctcagcctcagcctatcaatatgaatgcacatcgcttccctgttctcttgctgtgccagtctttccccagtgtagttaggtagtgtctccaatcagtcaccatcaccatactgtgctgattttatattctgaatattttttaagctttttcctttttatcaattgactacactagtttagatcttcatcatattattgtacacaactgctgggttttttctgtctggaaagtctattttcctctttcctccccagctgcctctttcttctgcctctggatgcatttcctcattttcctgccttccaagatgtatttaatacattcctctgtgctctcatatgctgatacatgtctgtcgctgtatttgctgtgtaatatccaaattatttgtgcatgtctttgtttttctccaaaagttgcaagctccttaaggtcaggagctgttctttaatatatctactctacctagtgtagtcatgcttaatatttgttgaagtaaacaaatctgaaccccaaatgtattatgtaatctccatatcccagcacagataaaggatatgctcttgaattgttttattgggagaaaacagctgacagattaggctacacaacaactaaaaactaagaaatgactacatgataaattgtaatgaaaatcggaaggcagactgactgaggaatatatctctaacaagtattcaaagatataattttgttattgttaaaaagaatacaatgaatggagagagggtttggatttcacattcaggacttctgaagaccaagtataagagattcaaaagtgataatgtgaatctgattagaaaattcaattttggaatttaaataagaaaaaaattagttggtctagcaggtgaggctataatatggaaaaatgagaaagggatacagcactgaaagtgaaaatgtggaaagagagaagatcagaaggggagaaaaaaagaagaaataaagggttagagtttatgaactgtaccaaaagaaatgatacaatggccagtcctgtgagggtagtagagggatctctttattgtattttcttattttatttttattttagattcagggagtacacgtgcaggcttgttacatgggtaaattgcgtgaagctgaggtttgggcttgtaatgatcccactgcccacgtagtgacataggaccatagggagtttttcaacacttgctcacctccctcctcccacccttttggaatcctcagttgttcagtgtttccatatttgtgtccgtgttgcctccagtgtttagctcccacttataagtaagaacatgtggtatttggttttctgtttctgtttcaattcactgagaataatggcctccagttccatccatgttgctgcaaggaacatgatttcatctttttatggctgtatagtatttcctggtatatatgtagcacattttctttatccagcccaccattggtgggcatatgggttgattccatgtcattgctcttgtgaatagtgctgtgattcacatataagtgcaggtgtctttttggtagaatggtttattttcctttgggtatacactcagcagtgagattgcagggtcaaatggtggttctattattagttcttgagaaatctccaaactgttttccacagtggctgaactaatttgcattcctgccaacagtgtgcaagcgttcccttttctccacagtctcaccaacatctgttactttttgatttttttaatatactagccattctgagtggtgtgagatagtatctcattggttgagtgtggtttgctaatattttgtggaggacttttgcatctgttcatcagagagatattggcatgtagggtttttgttgttgtgtctttgccagattttggtatcagaaagatactggttttgaattaggagttcctcctccttgatttttttttttttttgaatactttcagtagtatctgtatcagctcttatttgtatgtctggtagaattcagctgtgaatccatttggttcagggctatttttggacattaggttttttattactgattcaatttcattacttgttattggtctgttcaggatttcagtttcttcctggtttaatcttgggaggttgtgtgtgtccagaaatttatgcatctcctctaggttttctagtttttgtgcatagagatgtacatagtagtctctgaggatcttttatgtttctatgggattggttgtgatgtcacttttgtcatttctgattgtgcatattcagatcttctctcttttcttgttaatctagctagcagtatatcaatctttttttatcctttccaagaacaaacttctcattttgtatatcctttgtatagttgttatgggtctcaatttcatttaattctgttctgattttagttatttcttttttttctgctagctctaggtttagttttgttcttgtttttctgttttttttttttttttaggtgcgattttaggttgttaatttcagatgtatcttcttgatgtagacattcagtgctagaaactttcctcttaacgctgccattgctgtactctagaggttttggtatgttgtatctctatttttgtttgtttcaaataacagtttgacttctgccttaattttttgtttattttagagtcattcagaaacaagttgattagtttcctgtatttgtgtggttttaagaattcctcttgctgttgatttctgttttttttccactgtggtctgagaagatgcttggtatgattctgattttttgaaatgtattaagacttgctttatgactatgtgttcaatcttggaatatatatcatgtgcagatgagaagaatgcatattctgtagttgttgggtggagtattctatagatgtctattaggtccaattggccaactatcaaatttattaaatacaaaattttttgttagttttttgcctgtctattgctttcactcgtgtgctgaagttccccactattattgggtggccatgaaagtcttttcataggtctataagcaattattttataaatatgtatcctccaatgttgaacatatatatatttaggatagttaagtcttcttattgaattgaacactttatcattatgtaatgcctttcttggtccttttttactgttgttgtttaatgtctattttttctgatattagaatagtgatccttgttctttttttgtttcctatttgcatgatagatctttctctatccatttacttgcagcctagcctatgggtgccattacaagtgaaatgggtatcttgaagttagacttgtttttagtctaatttgccactttttgccttttaaatggagtgttaaaacactatgacaggaataaaaccttacatatcaatattaactttgcatggccaaagttaatattttatgttaaaacactatggcaagaataaaacctcacatatcaatattaattttgactatgcaaaagttaatattgatatgtgaggttttattcttgccatagtgttattatctggttgctttgtagtattgattcagtcactgcttagggcctgtgggctatctgcttgcatgtgctttcatggtaacaaggatcatcctttccttttgttttcatgtttagaactctcttaagtatctcttgtaggtctagtgtggtggtgatggattcttttagcaattgcttatctgagaaagaatttatttctctttcatttatgaagtatagttggtgggatatgaaattattggttggcattttttttctttaaaaatgctaaaaatagtcccccaatctcttctggcttgtatggtttctgctgagaagcctgctgttagtctgatgggtttccctttatagatgatatgactgttttctctagctgccgttaagtttttttctttcacgttgaccttggatagtctgatgattgtgtgccttgaagatggtcatattatatagtattcttccaggaattctctggatttcttgtatgtgcatgttgacttctctggcaagattgaggaaatttccctgaattatatcctcaaatatgtgttccaagttgcttagtttctcttatctcagaaatgccaatgtcactttacataaccccatatttattgaaggttttattaattgtttaaaattatttttttctttatttttgcctgcctgggttgattcagaaagctagtcttcgagccctgaaattcattcttctgcttggtatagtctgttgttaaggcttccaactgtattttgaaattcccatagttaatttttcaattccagaagttgtgtttggttctttcttaatatagctatgttgtctttcaaatcttggatcatttttctggcttctttgtgttggatttcaactttctcttggatctcattgagtttctttgccatctagattctgaattctatatctgtcatttcagacatttcattctggttagggttcattgcttgggagctagtgagattctctggaggtggtaaaacactctgacattttgtattgccagagttcttgtgctggttccttctcatctgagagagctgatgcttttttcttttcttttttgaatttgctattgtttggatggagcttgttgattttaaattcttttttcccttgtgggtatgactgtggtgtaaaatgtgtatgggtggatcagcttcatttctgagtgctttcagggcgccaaggctctgtatgggttccttggttgcagataagtttgtgcggtggctgagacgttgcttcttgtagtgatgtaattttgttttgtagtgtaattcaggctgcagcccagtaggtggcacttaagagtgagcgccagaaggtaggggcaagggcagaagcaatggaaaagtctgcaaagtgccctccttcagcgcgtttgccttcagtgggagtggaattgctggagaagccccaaaagtggtctctttcagcccacactctctcggttccgctggggagagccaccttcgagtccgcaacagtacactgaagagggatgagagaggtgagcgatgaccccttctcgacaaccattccctggctttggtggcgcccccttcagtggctagcgcagtgctcctgtttcctttgacccaacctttgacccaagaggggctttagccggctacatccccctcccttaggggccgactgaaccgagggctagatttctaggggagtgggtcccttcccttaccacttttcagagctggtgggttactgtcccccaactgaacaaggaagccgactggggaacccagtagttgatatgtaagggatgctgggaagtgctgggtaaagaagggtgagtccctggcgagggctccacccccaggcctgtgcccacggacctaggtgaggacaggcactccagcctttgggcccaaatgttgcatttcccaagaccaacctagcctaccatgccccctaccatcctgtgcctataaaaaccccaagaccctagcgggtagagacacaagcagctgaaagtggagaggacatcgaggggagcacgctggtggaagagcacaccaacagatgctgccacctggcaggccgtccagcagaggaatgacgcggagtttggtcgtggcagtcataggagagcccgggctgctgagcggctggactccagggggaaaccatctcccttctggctcccccatctgctgatagctacttccactcagtaaaaccttgtactcattctccaagcccaggtgtgattcaattcttccctcacgccaaggcaagaacccgggatacagaaagccctcgtccttgtgataaggtggagggtctaattgagctggttaacacaagctgcctatagacggcaaaactgaaagagcccatggtagcacatgcccactggggctttgggagctgtaaacatccacccctagatgctgccgtgggatcgacccccacaacctgcatgctcccctagaggtacgagcagcagggcactgaagaagcgagccacttctccagttgcacaccttgcaagggggacaagggaacctttctcatttcgtagcaacacacgcagactggttccaggtctcaaagctgcccctagctgcatgtcttgccacccagaagaaacctggcttcgggaactctcctgcccctgcagtcttctaatgctttatgtctcttctctatcgcatccaagcattctctcctagactatctgctcagaaggtgtccacttactattctggcgtttctctgttggggagccacacactacctgcttctgctcagccatcttgatccctttcatgtctctatttatgaaggatgaaaatggaatggagacatggagattgaggattgatgatgaggcttgttgaaatttgatgataatttcactaagaaacttagaaacagggccagggggtaataaatgagagacacaaagagaatggagtaagtagatatgatggacttgcaaagaaaaaaccttgttgaagagcagacgtgagctaatggactaagagaagcatgcaagtggggagactacttctgatagtaaacattttggaagagtgtgccatcaggagaaagcccgacttcagtgtggtcaaggagctgagcaagttatatccagaagtgatcaaggatatttgtgagtttgcttacaatatcataaaggcaggacaagactcaaggaagattcctagggaggaaactggtggggaagtcaaggccaaactgggctggataaggtagaaagagcatattgatgaaaataacagccttaggtgggaattgtagggggtaacttgaaggggatttgaatacaggagcctgtgttaaaaactagctttttcttttcttgctttttttcttagaaatgtatagaacacatccatttattccaacactccaagtgaggaataaggtttgggctcagcttgtagtccgcaccaatcactgagtattattttgaggggcatgtttacggggaaggtacgttgctggtgggattgtttcaaagtcttaatgcaagtgcctcaggtctattgctagacatttagaattttcttggttttttgaaagagaaagattagggatagttaatagtagtttaaaagactgtgcaaccttagtaacatttctttgcaataattaattaaaatcacaaggaaaatttttgcaaaagtttgggcatataaaataaatgaaagttatgactaacagttcaactttctcctgatgtctcacttttgtgagaactgatgtagaccagaaaataaatttctaggtgttttttgtttgtttgtttgttttgttttgttttgtttgcttaggttgacagatctaattttcatgtcaaattaggacactgactttccctaacagatgttcaggagctgaatttgtatcctaattctagtcttgctagtatttatttttgagacctgcaatccatcattatactaacatggcaatgcctaggaagtttaatggctatacgacttctagaaagtgcctttattacatatctgacacattgcaaattcacaagtggagtacaaacaatttcagcagcttagatgacattttccttcctgccagtggtctgaactcaccaggtagcaacacccaaagcattacattctgtctccctgagttgcattgtatttttgatatcacagcataaactgtcaaaggaagtatttctctaattttaattggggttactagggtcaaagccaagtttccaaagctcattttgtttttatcttattatcatgcatttatagtaagccatttattttttgaagcaatccttattataacttggaaaaaaactatttcgtaatgtggtcagatgtgattagatcactgttttatgctcagacgtatgttccaccttttcccataatgctgtgacatttggggtttgtatagcttcatgaatcgaacttaaacagtaatgcattttcacaaataaatagaatcactcttcctacctattatgatggatcttaaaatatcctgccacatctctctcgttattcattcagtttctgatcttagtaatttacctatacattaaaacattgtaattatgtatttaaatcaccaggacacctatcatttggtctctaaaactgagttgctggttgttagagaaaaatgtatttaacttgtatttatgaatataactggatgagattctggttatttaataggcagtttaacttgagaaacagagtagatgggaaaaatgagaacttactgtgctttaacaactttacattaatttgttggttcattgtgagctagtttattacagtatattgaactgtttaccaaatagtaaactcgattccagtgtttagaacatgcttttttaaaatgacattcttaaccattttgccttattgcaaggcatttacgtatatacattgagaagctgtatctgatcatgtttctgcagagatgtgttatgaactgctttagtacacggatttttgaatcttaacaaaggattttggccacctgcaaaataagaggttttcattctttttagaatagtcttttttctgggtccccagtgtatattttgccaaaatgcctaaaatattgcaataaaaaaactcagagtttggtaccaatctgacaattaatttttttaagcctttaaaagtatataaacaattttagccaatggacacctctcactgaattgaccatatagatcatattagtccattttcacactgctgataaagacacccttgacactaggaagaaaaagaggtttaagggactcagttccacatggctggggagacctcacaatcatggcaaaaggcaaggaggagcaagtcgcgtcttatatggatggtggcaggcaaaaagagagagcttgtgcaggggaactcctctttataaaaccatcagatcttgtgagacttattcactatcatgagaacagcacgagaaagacccaccccataattcgattgcctcccaggacacatgggaattgtgggagctacaatccaagatgagatttgggtggggacacagcctaaacatataatagacctatcagttccctacactaataaacttccctggtattatttccacagcacatgtaccctggaaaattagctccaggtgatgagaaattcagttgagggcagtaaaaaagaaaccaggtattctcacactaatttgagggtttaatctcactgggcctcctgtttgtttttagtgcattggaggaaaattagattttctgagtaaatagaaatgagcaatgttcctatgtatatacacttaactcttcaaaaagaacaacataggtctgtactggcacaagtaaaatgttgtagaaattgggtcaggtgccaagtgtgagcaacctcactctccctaatcagacagcatttcttatattatttctggattaatataagtaggtaatcttgaataaattctctagtgaatgttctacatcatttattgtcagtgaatgtacagatgggatagtcccagtaaatttttttagaaaaccaaaccatgttcaggatcatggatacttgtattcaaggttttcatgggcattcaaggaagaaagaggtgatgcaacatgccgtaagccagattctctagaaaacagacttggaggcagagatttaggcccaagaaatttgtttgggggtggggttctcttaagatcaacacctgtgtgcagtagatttctctctctttggataaaggcaattccaggagagagacttagctgagaagactcccagctgctgggggaatgaatgcctcaatcctgaatgggtatctgggttgcatatttgagcaaaacatcctaactttagtaaataaagctacagctttttcttatttctcctatctgcttcttgcctgggcaacctaaaatttatccattatccctgctatctcaccaggaagagtatagcgataaagagcaatttctatatcttatacattatatttaactataacatttattgttattagatagttagattaagtaagaaataaggtattcatgattcttttgaatctgtgtgaatatacatatagttaaatagtgacattgaaagtatggtgaatttttatatcatctttctggagaaatactgaggaaaatacttgaattttgcataaccaaggcatcagttactattcacaatgagactacagagaaagctttccaaaatgtttaaatgaaatatgctttcaatgttatgtggttttcctgtgatgtagctacttaattagcattgtatcaatcaccactgacatcaaatatgataacttgctttactggaaagtcactgctcaatctcatgaatgaaattgatgaggtagaaggtaatggtgcattgccaagaaaacaagaaagaagggagctaaaaattgagagttacctactttgcagtatctgctttatatatggtatctgatttcagtttatctgaaccctcccctggaagtagctattatcaactttatgttatttacttactcattttattctttttaaaaagaataatgagatgttttaaacatagagaaaagtgcacagggcaatataaaatcacatacataatcatctcccaagagtaactaatgtcattataggtaaagtttgcttcatatcattttaaatataaatattgcagatatgcttgaaatatatgttaggccatatgtgttcaagctgaggaaaggtaggttcagagagaaataatcttggccaatctcactctgctagtaagtagggctaagatttgatcgtctatacgtggatcgtggaactcatgttctttccctccactatgtatacttcctctgtactccctgaagacttaatctggatagagatacattgcctagagtttctctatagtgggagaaatgagccttttactttcgtggtaccacgtcagttgccaattgattctggcacataaaaatgtattatatctttacctgtttaattattttctgtaccacatcaaaggaacaagataaatttggttataatagtttattttactttaatttactattattagtcattgcagtacacaaatgcagatgtctgaagggatgcacaaagatgacaaatgaggcatgtaacatataaagaaatactacatttctaagtggtttacattatgtgtatgaacatgaattacctgcatggattatttttaagttcagaaactgtttttagttggttttctttcttttctatagctgttatttatgtctccagcttcatcttcaaagtggagatcataatatttatctcataagactcttaaaaaatgagataaaagcatttgatgaaagcatatgaaagcatttgactgagcaattagtataaagaagctacttagtacttatttgctatggtcacctgaaaagaaaagctattttgcatgcagtggtagggttgagaaacagccaatatattaaatattttaaaatatttttgtttaagttcaaccacctactttttagaaaatcacttagcatatgaaatttattttaagaggatacttactccacagttgctttagaagaaagaaaaagaaaatcagtttgtaaaatgagataattgtaagggtatctcatctttgtagccatatgagagagtccaaagagctaagcaaatatttgcgaaatgatatttttactatactggaagtaataaacaattaaaatgttgttattaaggcagtgctgatattataattttactatctctagaggaataccagagatcttattaaacacatgcttttttaaagttgaaatcttagataactattatcattactatatgtgtaagaaaacaacggcatggagaaagatgtgctctatagaaaactggtaggttattaaaatataaagaaatagggagaaaactgaaaattgcatgatattgtcaagtctcccttgggactcacccacacaacagttctttcattgcaagtttcttttttccttaatgagtcattttgagttctttttaatgtgggcacaaggaaacaaataaggattcttccatgcagctaaggcaccccaaatcttattaattcaaatgttgagagcattgaagccataaagacaataagaatactgaaacaccatgtatctgctttcatttaaatagccaaacaattctgtattttccaagtgggcttccttaatatacatattttaaaccttgtaaggtaattctccagagaaatatggaggtctaaaagacaaagtaattccatttatcaccttaaatctcatttaattagggaataattctgatatatcaagaaagaaactaattactgtcttctagatgcttgtgcttttgtaagaaacaaaagagctcaagcaagtagaagcctcaggaagagagcagtattacagagggaccacagcaacaatgtttttttttgttttttttgttttttttttttgagatggagtctcactctgtcgccaggctagagtgcagtggtgtgatcttggctcactgcaacctctgcctccagggttcaagcgattctcctgcctcagcctcctgagtactaccacactcagctaatttttgtatttttagtagagatggggtttcaccatattgtccaggatggtctctatctcttgaccgcgtgatccgccctcctcagcctcccaaagtgctgggattacaggcatgagccgtcacgcctggccaacaatccttattaatattaaaatttaaaaattggcttgaactggagaacacttcaaagctcatttaccacagaactttgtcatttttctccttatttgactcatctcagttggaaagcacagatgttttatgcgtctgccttgctcccactctccctaaaattttacttaccagctaaaccgccaatcctaatacatccaacaatattttaccatgaaaatacattcaatttttgtatttagatgcatacaagtctcctgaaattgtgaaatattccaactgtacttggaaagctctctgaagatccccccctcaaaaaaaaaaaaaagaagattatctctagtggttatattttttgaaaggtttattgttctattgaatatatatctagttctttttcataaaaatgaatatcctggctttaagtaactgtttgctaagcacagtgtgcacagctatgcacacactgatatcaccattgccaattttattaaaagaaccacaatacagagcaaagagaaaaagagaagtgtccctattaatggtatttcaaatgcgtatttaaacagcttatctactccaaactaatttctgatagattaaatagctgtattccaaatcttacaagatgcacatctctcctctatttctttctcggcttgcttcagctgaatagctcaaattgtttggcactggtaaagcatgaaaatgtgagataaaaaaggaaacgaagctacagcctgagtggcctacaggccttagaaatggcaacactttaaaattcattatattttacattgcttcaacagttacacattttttttttttttttttttttggctcttgatgatgtcagaagatttatctgggatgtctgtctccacgggtaaatagtgaccggggtgaaaactgagggaactagggagcacctagaccccaagccttagtagtcagctctggaatgctccctgcagtgtggggtgtgagtgtggtgtctctgtgtctctgtgtacacactgtgtgtctgatgtgcagaggggaaggcagggaagaaatactatggcagacagtcacttgtggtagctctctaaagggatctggcacttcctgccatttcatggaaaagaggaatgagaaggaaataagcatttgttacatgcgggatctcactggatgctttcagtgctagaagggagctatttctcctcctaacgtctgtaactcaccagatttcactaattcagaggttgctttgaaactcagagtcaaattcatagccagggactaagtcttcatgatgtgcctttttgttttagcctcctttccggcatgttttttgtgttgctctccttcctgattactttttattagtgctatcttagtttatgtatttttataaactgccttaaatgctttctggaaccactgtgcatttaatcaaatagactaataactaactaggaaaatgatagggctgatagcatcgtctgacccatgaggaagctgaatttaagtagcttgtccaaggtcactcagcaagtcccttgtgctgtgagtctggttcttggctttcagtcagtattttcaagttttacctacttatttcctcttaactgaacacgaaaaaaacctcaaatgcttatttctttagctatttctatttctctgcagttaatgtcctatcaacttgaaattcctcccctgcctttcactcccagtagaagtttcgctcacctttcccaggatgcttgaaataccttctcatgaagcatttcttatcctgaaaaagcatcattgttacatctcttcttagacgctcctttgccttctgttttcaatctagaaatttgtttctcccccatctccatactgactaggattttgtttgcttgtttcagtttagatcacaggtgttaaaaagatgatcttacatatttaaatgatggacatatgattcctattatcttctacttctatgcattcctgatagacaactcttaggctggaaactaaaacaagaaggcctattaactatttttgcaaaataaaattgtattcttaaagttaagttcttgatgcagggagaaaacattttatgattttcattttacttcccacaataatacaagcatgtcaagtattgacctacaataaatgcttaataaaaacctagtatttttcagtcactttaacagggcattgtatatttaatgcattaacgctccataggccatgtctcctatgtactttgtatgctcagaaagggaagtaatgtacactggtggttaagaacatattaacctgagtacatctttaaacctcagctccactccttgcatgttgtatgacattggcgagtcatttaacagctatgggtctacatttcttcacctgtaaaatggggataataataatgtctatttaataaatgtattgtgatagttaactgaaataaaacatgtataaagcatgcaatagggcacatgggaagtattttataagtgttgtatgttattattaacctgtaaagaattcatacaagaaggcacagaaaaacatcaattgcaactaagatgaaaagtttgttgctgttagagcaggagtagttaagatggtatgtatttcaaatatccaaaagcttcttctatttctggagagcaaccatgggaagtctattgtggcattagatagtgccacagagaaaagacaacaggatggtgaggacaggagttgggagggtggagccaaggaatcaaataatgtggtttcctagatgacattcttttcagaagcccagaggtgccacatctattacaaagtctctaaccaaaccatatccatgaacctatacaagataaattttaacagagtgcagattgtctttcactctacatcaaactatagagtccagaaaaaatattttatatcatgatagtgataataattgaaggaatcagaaggagttgatcattctctacaagcttgttgtcatgaggagggaggtgaaaagcattaaaaaaaagcttaaacccttttcccaatatttcaaagtagctttgatggtatttagatagcaaactcattttaaagagaataggattttcacaaaacggaaaaatcaagcagctggcatagtaagttatctgaatttgatctgaattgacgtcagggagctgggaatgcccctggcaatcctgcattctctctctttgtgcagtattttgacagtagtgagaatgtctgagtgttaatcattttctgacagtgtaggctctaatcttatgcaaaatgaaagcatttagagattttaccttcttggttccaatcagggcatttcttctagaaaaactattctgcagtaagattgtgtataacttattttacatttgtatatgtttatatatatttatatttatataataaacctaaaaatatgtaactgctaagtttggtagtagcctttcttcaaagcatcattcttgagaagagagtttattttgtaaaaccttactggtagagacataaatctaaaaaacaaaattcaatccagacttttgtatccaaatatgaatgttaatttcctgggtatatctttttttaaaaacttgcagtgtgggtatataagcagggccagatgtctctgtgttaatcatttctactctttaataaataacggtggcgtacagtgaaaataaagcccagatggctgacacattgcacaaatcactggatgcactgtatattcatttcatagtttcctgaatactaatagatgatagagtcatcatctttttatctgttcctcagtcaaataacaagtaactacttactgtgtcttctaaaagccactgtgctagtggctaggtaggttataaaaacccaccagatattgcagatagtaccacaatataatttgctttaatctctatgaccttcagaatctattacatcctagtcttccctaggagactggggtttcttggaattattttaaaaaagtgatccaaaactggatctgattttgccatggggattgcttaactaattggtttattagcttgagtctcatgcatcatggtggatattactggttgtcaagttgtggttggtgaatcgtagacttttagaactctcagagaaattcagagttgacccacattacattttacagatgagaaaatgtgaaacaaatgactaaatggtttcactagagccagacagttactgtcagaattgaagcttaaactacaggctgctaacttgtagtctgcagcttttgctagtatgtatgttactttgtctcagaaatgtagtgaaattaaatgtagtgagattaaaatcggtatcacaggaatgaaggtgcagtaactttgggtttgctgctgccattgactcagggtgggatgaaagaaggggaacggacatcattgcacctgcttcatttgtttgttctagaaggaaaataaggaaatgaggtctggctccacacagtgtttcagtgggggctttaactggtctagattatctagaatttttcaatatacagaacttaataggcacagacactcaaatgataggggagtcaagtattcacaaagatatgacatttacagagccagtctgcaaagataaagatatgctaagtggttgtctgtagacaattatagtccattacaagttgagcataaaaacataagcattattcatcagatactgaatcaccagttagtgctggtatttagatgaaaacatttggcttggaggggaagcccctcaaaaaccatagttttgacttgtttctaagaacctgcctgtcatggaaaagcctagaccctagtggaattccccagggatgttttacatagttgggattctcagtagttgatgatattgggaagcagaacataaccagaggagctgggagtcagccctgcccaggtggggcccaagcaaaaaccatactctgcctttccccaagtcacaataaattgtgttctgctaagttgtagttacactgtctcttcaaacagagaccataataatctttgctgcatttattcagttttatgtttatgctagtgatgtttgtcacttagttaaaattagctttaatatggaagaagagggtatacctctttctggaaatgtaacactcagccttaaaggtaaagggagcagcaaaggtgtccctaaaaagcaacttgcatcctgagcactgtgtggatagaggccactgttgccagacatccagccttagcaggttgcagccttagcaggttgtgctgtctttgtatgtggtcattttggtaccatccagaacccccacttactctcctgctcctccaccaccacctccagtccctggttgcaatgagccacacaaaacagaggaaagtaaacgggcattaccttagtatcagcaatgctgggatatagttctgctggtagctcctcctaaaaatacacccctaaaaaataaaattgtaagaaaaaaagagttaaaaataaaaagtttcagtctccttgccctgggcaggtccttggaactgtagaggattttaaaggctatgaaaattattttttatggaattccagagagggggatgggctcaagtttatatgtgagatacatatttacttatttaatagatttgaaaatttatttctatgtttattagtcagggttcttcaaaggacagaacctatatgatatatgcatacatagaaagagatttattttaaggaatttactcccacagctacagagactgagaagttccaagatctgcagccaataagctggagacccaggagagctgctggtataagttccagtctgaaagctggcaggcttgatacccaaaaggagcaaatgtttcagttcatgtccaaaggcaggaaaaaaccaacctcccagctcaggcaggcaggaggaatcctctcttacttgtggaaggttcagcctttatgttctatgcaggccttcagctgattggatgagggccatccaaatgtaggagagtaaccgctttcctcagtctaccagttcaaatgttactcttatccaaaaacaccctcacacacataccccagatgatgttaattaaatatctgggcacccagtgacccagtcaaattgacacataaaatcaatcatcccaccatgtatatttattcatatgtaaaatagtagatttatgtaggaaatagaaaaatgatggttattattagagaggagcataagaaggaaatttgtgatttgaagatttagagtccattattgctaatgaccattaagcaagaatcaaaaaattttgccctgttatgataatgatgtgtacaccattctaaaaataatccttatttactaaggcatcacaataacttctatgggtccatttcagacacaacaagggcgaatcacctttttccttttatttctttgacttctgttgaatattttttatgaaaaatcttgaatttctaagggcatattcttttatcactacagggatgattttgcctgaatatctgaaatagcattgcaaaatgattttctttagcactttacaactgtaaaagaaggtcattttaaaggcagtatttaaaagaacaatgccacaataagtggctcttctcattgcccttacattcttttaaaaagaagagaccagtagacaatggttaaaccagcatgtttcaacaaacacatcatcacttaattaattgaagcaactttccaaaagtattaaggaattaaaatatgtaatgctctagaataggagaagcctaataagccaaataagttcaactatgaaaaaatatctgtcattttgttaattcacaagctggagagggtatgaatgttaaggggatgttgtagctagcctagagacttactcttaggtctaaggcaggtacttaaaatgtgagagttgaaaagaaatttttttttattatttttcttttttcctgaagaagtgggttttgtaagcacaaaggatgtagagaaaaaccatgctttttgattcagactgcagtggggaaggtatgcaaattaacttataatttctatgccaaagatttttttttggctctttctctaaatattttactaatatcttacggcatacagattggtctcccaacttgcaggagacattttttggaggttgtatttttaatttttttttcaatactgaaaaattttataggggaaatgagaagagccagatgatgaatggcttcaacaaagggactgtggtcaataatgacagtgatgggaacaacgaaatgaccaaaggtcttgatttccaagaaaagtcaaatcatgaaggcttcatgttggaggagaccacagaagtgtggagactcaggcaggttccgggattttaaaactctaccgctggagcagcctttccttaccaccacccaaatgcacccatagagcagggaataggggtcagaaattatggagatttccacttgaagggttccatgggtctaattcaactcccattttagagatgaagcaggtgagtctcagagaagtgaatgatatattcaggacatatggctaaggggtgaccaactgcagactaggcttcttgactcgaacttttttttttttttggactacattgtattactccccagtctattaaaaagtttaactgccatattgaacaagcaagactcatacagcaaagtcagaaaacatttgcctttccctccactgtcattaaaatccaataaagagttaggtcttagcatgccaatgggactctaaaaagaaatcctctctaggattttttgtctccctttgacctcttttaaaggctgtatgtggggtataagctaacggtcagaatagctgcgcctttgcaagtcctaccagatgttgcagcaactccagagtgtaggaatatttgccatctattgttttgtccttggccttgttaggacttctactgcaaatagagacaaagagccttcaggaacattctgctgtgcaagtggtcaccaagttcatgtgcatgacactgccctggtcattgctgtcctggttactctgcaaacactaaagccgattggccttgacttaaaatccatttcaagggaggagaataacataaattgttttaatcagggcaagttttattgtaataaagtaaatgacacaaaggcaggaactacactgccctattggttattatcacctgtctggcacacagtaactgctcaataaatgaatgagtgaacagaaacctattaattggatcaagtaaaaagagacttattggaaagatacaaagtaatttaagaaaaatgtcatattggaaaataatgcctggcttcatggggtattcccatcctggcatattggacccattaacctctcagtgaatctcagtgacccaacatggccacatgccatgatgatgtgactacagtgcccatcgtgaatgaagggaagcagaagcactcttgagtggtctgggttggaccagaacctgggtgttgggtggtagtgggaaatagataagggaggtaatctgtgacattggcagatggcatttttattaaatctcagactattcagagagtacgtgggaacattatcttcattgtaatatgatcttcttgaaaggatagttattcaaataaaaatatatactttccatgtatatgaacaataatgttgcatttattctaatgttacatttattctaatgtaaactattctatcctttttgataactttgcaaactgaaaactattactgaacagtttgaattaaaaaaaaaagcttggagtactataatattcatgaacaaaaatcttggagaatttcttctttaatgaagttattgaaatgctcatgcctataaaatttttcaatattgaaaaaaaattaaaaatacaacctccaaaaaatgtctcctgtaagttgggagaccaagagaccaatctgtatgccgtaagatattagtaaaatgtttggagaaagagccaaaaaaaaatgcttggcatagaaattataagttaatgtgcatactctccccactgtagtctgaatttacaagatatatgccatgattattctctcagaagattttttatgagttcagtactgtcttgattaagcttatgactaaataaacttcttttcatgacattgtcgaagagtatcagttttcagacagtgagaaaaggacaagcagctggaatcagctgagaacccaacaatctattgtaaaaatacggtttattttaccactcggcatatgtattcatacacatatatgtatattcaactgagacaaaagtttcacaaaatcctgcttactcttactacatgtgatgatctctgatacatgtgatgatctctattctgtttgttttaaagtttgtcacaacacatgaaatttgtttcacaaccttcctgttggtcatgagctctgtttgaaatatgcagactcaaggcaaaaatgtaaatgggaaatttggaattattatccaggttggaaggattaaaaaatagaaaatacgtatgatttcacctttctttcttctgaggccagataaaggtaactagtctgaaatctagttatttatttatctggaattgtttagggttaaccatagctagtaagggtagactgtggatgtagtacagtagctacttaaaagctgttatgtcatgagcctcccaaccatgacggtgcttaggaactctccagggagcattgtaaagtatgcaaaagtcctggaaactctaggccaagtgatttagaatctctgagcatggggcctgagcatcagtatttttaagaaactccccaggtaattgtaatatgaagctaggacccaaaccatcaatagcaactctgagtagatgcctttgccttgtgcactgaatacttttgtcatgttaacaatgcttttttgtcatattttatgacgtgtttcttgtgtatcacccaaaagcaacagatatttttgaataacagaggttactatgagcatacagttatgcacatcattgaacctcaaattttaagatacttattactaaaatgttatactgtgatttattgaaaattttatgaagaattcattgacaggagcaggttatatgttaagtgctacttttctagttgaatgtggctcaggagaaatctagttaactaagtcaaatagatagtttttaatacttatatttatttaaatagtagacttccataatcctcagttattttatgtcttccaaaaccaaaaataatttctttaattttgtcatagattttaattgaaattggtgaacatatgcacacatacacaaaaactgtagatttagtgtctgtggtatgtaattgatgaactgttttctaaaaggattttgaacgtttagaaaactaattaagatatttaaattattgacaaatagaggatctttctgtacccaatttaaaaagaagatacaatgatttgtggttagtgtatccatttttcaaacataaacagaaacttcagaagttcttaaaaacaggttgtccttttagataatttctacatttcctctgaaatcttatttctgaattaagtctagatgtttacaatctatctgaaaaaagtaatgttgttataaacctcaaatccgtgctcatacaaattcttaccatttccaattagataatactctggcaagaattactaatgcctgaaaaaatagatgtaaatattcccatatgatggtaattattaaatgttatcaactaagtatagtgttttgttttaattttaacttttattttagatacagggggcacatgtgcaggtttgttacatgggtatattgtatgatgctgagatttggagtatggactctgtcacccagatagtgagcatagcatccaataagtagttttcccacccaaactctcctccctcccttccccttctagtagtctgcagtatctgttgttcccatgtttccgtccatgtgtactcggtgtttagctcccacttacaagtgagagcgtgtggtatttggttttatgttccagcattaatttgcttaggattatggcctccagttgcatccatgttgctgcagaggacatgattttgctcttttttatggctgcatagtatttcatggtgtatttgtaccacattttctttatccaaaccaccactgatagggtgggtttcatgtctttgctattgtgaacagtgtggagatgaacatatgagtgcatgtgtctttttggtggaatgatttgtattctttgggcatatacccagtaatgggattgctaggttgaatggtacctctgttttaagttctttgagaaatctccaaactacttttcacagtggctgaagtaatttacatgtccaccaacagcgtataagcagtcaatttcctccacaatcctgccagtatctgttgttttttaactttttaataatagcctaaatgtagtattttaaaatatctaagagtttcttacctgaacctagccaatgtattttttcatcttattaaattacatacacttttattttagccctcattgatttattaggtatataagtaagcatattttgtagagattctttaattttttttttttttttttttattatactctaagttttagggtacatgtgcacattgtgcaggttagttaatattttatagcactaatatgtccttttgttttttaagaataaaatttataaattgttttataagagtaaaatcaatgtaatagctgctgctgctcagtacaattaaacaagttacagaaatcctttactcagtatcactaccaaattttttctaatattctcattttaattttttgtaggtggtttttacagttgcctttatatattctgtcaattgtgaatagaaattcaaattcttgaatttgataattgtgtcatttttgtgttccctagcttttatttgtagactgttggtcctattgttctttttcatgtgttactattatctctggatattttcttataaattattgaaacttatgagattcaattaccttccaaagtgatttattgttacgtgctgtaatgctattaataagtgtagtttgcaagcaatgtttcaaaattttgtctacttaaaatttagaacaggatatttattttgtaatttttggatagatagaaaatctcctttctgccatcatgaaactgataaatgagttatagggatgggaggagatggacatttgaccacatgcaatgcagttttccaaagtatataaccataatctatattaaaggtaaatgcagtgtcagatgggcattactttatgcaagattgtgttgctcatgaacttaccagccaaaggagactatctctcactaaggcttatgtaaaactgccaggagagaataattacagtgggagtaaatttgaacacatgcagtagaatgtctaaaagttaagcttctcagagaaaatgtacatatgcttggattttacaaatgatgtatttccaggtattcactaggcctgctaaaataagttagcattttttaaagataaatatgttactgaaatatatcctacataaagtaccaaattataggtttacagtttgatgaattcctgcaaagtgaacacatctatgtaatctccatcctgatcaggaaatagaacattgtcaattctcccagaagtccctggtaccataccccagtcccctcccaccacatcacataagattaggttttgtctgttttgtttttttaccattttgtgttcttggtgagagtgctgcttttccataagcaatttcactgtatccagaaacagaactcagttaaattttaaggccactattttcttcataaaatagagggaagggagaataggttggtgggaggaaactcgtgcttctgattctttccctagcctatgatcaacataatcatgccttaagaaccttgctttctgtctttgagtgacatgcttggaaaagtttttgaaaacatcagtttgtgttctttacatattcattgtataactctattttatatggtattaataataaaatggaaacaaacagaattgtggaggggaaaaaaagagaaattttaaagacaagcctgccctctaatttcctttttgccatgagtagtcagtgggaagactctgggagcttggggacattgaggcatacagcagtcaacaagcctgagccctacaacgactgagtctggaaagtttagattctgaaagcctaaaaaagcactgtgtaagaggctaagccaacctttttgttgttgttaatctttttactgggagacaagaatggaccttagggatagggtaaaaaactgagagcccccagcccctttaagatattttctctaaacctcttaaagttaactctgattaatttcttggttagaattcaagttatggttcctgctctgcaaaactaataggtagtttaaggtgggaaaagtaaaaattcttgccatctcctacattgacttgagagtgaaagtaagactacagatttgttatccccaagacagttgtagaaaactgagattatgctttataataccctatttcaagtggggttaatatataaccatggttcttagccttatttggggttagagacccctttgagaatctgaataaagctatatgtcttctctgaaaggtgtacctaggtacacataatttagccactggccttgtccgtttgcaggccccgtaagctaatgcacagttccctctgaggatccctcagctttattctaaagtctaaaattctctaacggttgccagtggaaataatccaggagtgatagaagtatggtccttattacagttatctaggaaggagaccacactgtcttcatcctttacccttccttggtttcaccttcttccttcatgacttgaagattcctttattttctcttacttccaactcaaaattatattggttcatgctggtttcctttgtttaacagaaatattccttttgcaaaatggtaaacacctttttagggggaaaaaaaacccaaccaacactgttcctacagttgtagatagtaattaagtcaaacccttagttggttttcatttttgaatttaatactgcaaaaaattaacttttttgcataaaactttttatgacttcagttattaatattttattattttgattaattttatgtaagtcaagatagtctaggttattctgcagtaatccaaaatctaagtggcttaatataacaaattttatttcttgttctcttcatacatacccaagagggattggcaagaggctctacttattgtagtaaacctgggacccaagatgattgatgctttatctcaactcaggcttcttcaccagggaaaaatgatgtaatgaatccgtcacaggttgcctgaactttcacctagaagtgacacataccacttttgcttaaaataattggtcaaagtatatcccatgttcatgtaggataccaaaggggaggctaagggcaatcttaccatgtgaccagaaaaaggaaagctagaagtatttggtagacacattcactcttttctgtactcctttccaaattctcctaactttttggagatttgattgatgttaagcagaaaaagagggtttgagtcttatttttggtgaaagaaaatattcttggttaactttgtcatataatatatctgaacttaaaataagtacacagtggcatataatgaacttaaaagaaataaaatactagcaggaatgtaaaaaacctgaacataacactgaattgctcttgttagtgttatgccacttagttccatctacagtctagcccttgtaataacacacacaccgtgattttagttaaataggaacatgcccctttctgtttcatttaaaattctagtcaacacaaattcttctagaaaaatgaattaagaatgagtactattcccagagtacattctggtttgtctataaattctaagctaagctttatatgggaactgtcaaaggcacagttgcaatgttgctgccttttttattcaggagaactgacttctgttgtcccacttggactgatatgttgagtgatgaaaagctgggcaaatctcctcagtcactttcttctgatagtttactttatggcttccttagtggtctgcatcattctttcagcctgaccatttgcttgagggtgatgaagagtaatgatgacaggttagatgagctctagcttcacaaatttcttaaatgcatctgaaacaaatgcagattcattgtcaggaataataacatctgggaatctggacattgaaaatcattggtacagggatgttcttgttgaagtagagacactataaggcattttgagatggtagccacaacaaacaagaaattctcctccttgaaaaataaaagaattattgatcaaatcttcctgatcattttttataggaaggaaaagtacctttggtggattatatggagtggcttggtgttgtctacagtcttctaaatgacataattaagtacaggctttagatataattattagtgtatatatcattttaaaattcccaggtgaattgtaaacattattgtaataatgtgataagttatgtgatttctctattctggccactcgaaattaagaattaaagctttgattagaaattagagtctaaactatatatttgagaggcattagtatagttgaaactatgagagtattttggtttactgagctagtttatgtgagaaagcaaaagacctgaaacagtcttttttcagtatgtattgtattctagacttttttctaggtcattctttctttccatattttctcttttttttttttttttttttcatgagaaagcagaatgattcaaactgggtataactatattaaaggccatgaacctagctttgtctgacaataaaagtcatgctcttattgctagattaaacttcctcctgtttatagtgtctgatgggattaaagagagaggatcttatgtaagtaagaaagtaatctttttcctacaatctgcttttagcccttactttcctcctatgttgagagcatttctagtccaaagttcttttttttaagtcattaagatgtattattcaatctcaagtaacttttaatccctttgtaaaaatattagctctttaattaggcttggtgtgcctagccagctgtctccagcataattttgggtaggcattagtatgttaatatggaactggcttataatcttaatttcaaagcatattggaaggcaagttttatgaatagtataaagagacttatatgacctgtcaaatcaattcataaaattcctattttgaaggggaaattaaaagtcaaggtaatggaaatgttatattcgtatattcgcaggagatgaatgacatggataggatgtctttgaaagttaatgagaaagctacttgccaggcaagttgttcaagagcaatgttagcaaatgaaatgggttgctgcctttggggaaatgatttatgatgatgaaaaccatctgggtttaggaggttggttgatgtgacatacctctcttccagcctttccactctctcttctttcctgtgcccagcataaaatcagtctttgcgtataaagagcgctatgcaagttggcttccagtcatacgaatatgtggtatgatttcaaataagattgtcattggatgctttggtcagcaagcatatttactttagatttgtatttactctttgtagttgaactggctaaactctaacaaagtatgcttcatttgactttaataaaatattatatttccaagaccgtatgtagtaatagcagaaggtgtgatttctctttttgcataaattggctcttcccttctctttctctgtgtttttcacatctccctactgtcatatatattctgacctgcctctggtagggctatttatgtcatatccataattgttatatattaaccatttgaatgtggaataaggcaagtacagtttaatttttttatataaaaaatatggaatatactgtaaatgagttctcttaatcacggagtagctacctctggaagctgtaactgttggtcttgggctgtaatatattatactacaaccttaaaaatgaagaaaacaaaaagacaacactctatgtgctgctagacaaaggccacagttaaagccaaactgcttgacactttatattcttcaggcctttttaacgaccttccctttgggtgatgcattttgtagctgttgtcacttgtacagcagagagggaaaaggaaatgaataatctgatttgaaggggtgtagagggatgtgagtcttaggaagatccttaggatttacagaagctataaagctatttgtgctgctttgtggtgctttgcaccctgtgtcagttaatagtttatctttaccccattttatgctctaagatatagatgatgttttaaaaatcattctcatagtcttctttcctcaagctccaccccaagttttctagctcctgaccagcactgttagcttttttgatttaatcttcacagtcttctcatttatgaaatacaaaatgaatgctatgtcaagacagacttggaaaaatcttttaaaatggcaatacaggctcacctgcaattaaagtcattccattccatttagtgtctttttctttttctttttgagacagggcctcactctattgcccaggctggagtgcagtggcaggatcatggctcactgtagccttgacttcctgggctcaagcagtcctcctgcctctgcctccctagtagctatgaccacagatgcatgccaccattcctggctatgtattttttaatttttagtagagacagggtctcaatatgtggcctaacctggtctcaaactgctgggcttaagcaatcctcccacctcagcctcccagagtgctgggattttgggatcccaggtatgagccattgcactcggctccatttagcttctgatgagtgtaaatattaactttgaggtcagttcacagtttgctgatattaggactgattttttttaagttatatttcatttaatagtggagcaccttaggaaaaaacaaatctctttatatatagaattaaatttgtgaacttttctgaagtacatttttatccttttaaatatgccacaacatctatcctgtaagtaaaataaatatttctaaatgtctaaagcagagaaatattataaattaattaaaatatttcctgaaaaacaaagtaaatcaatttctcaatttacattattcagataaaaatagctcaagaactagctaaacagtattagtgaaattgaaggtcaagagatgctagaaattagtcaactcaggtttatggaagatcttactatatactctgtaatattcaaaactatttctcggcttaattcactgatgaaattatggtattttggtagttggaattaccaactgtctgcaacagcatgaactgacaagaaaatagtgccctctatgagtaggagtacagaatgttatcttattaacaagaaccaggggacagtaggaatggacaacagcattggttagtggcacagaccaattcaaataatatattttgtgtgattttttttttccttaccagcagtttgttggtgaggcagaattaaatagggaagagaaatgcacattccctatctctgtccctgcagtttcattaaattctgaccaaattatgtgactcagcattctcagagaatagtctctgacaggtagcacttacaggagacagacccacaccttctagcatgtgattcttaaaactctgtgtgcagactggtgcccagctaaccacataaaatttaccaggggtgcttattaaaaatggaaattccaaaatcttacctccagagatgctatcttggtgggccctgagaacatcatgtttttgacgaagtcgcccaatgcctttctggcgtggtcaaaagcaagaagcacaatgcctttttgtgcttcttggttttgaccaagtcacccagatgattgtggtgcaatgcctttttgtgcttctgcctttagcgttggtttgcccagccagcaccagatcaggcagctctattagctgctgctatcagcacgtggatgttctctcctcttcgtaaatgagatctcctctactctcccaaaagtcccatattcttttgggactctttcttttgttagctcttgcttgtcaagaatggaatggggaaatcatttcctatggaggaagtttttctttggcttttggtaactgacagagtgaacagatttcttcgctgggtatgcactgtgccttctcccacctattccagagctgtcactcaggagcactgttcaaggccatcccctgccttccttgtgtagagggctttctgtgaccagcagacagtcaaagacatcgtatctatacacagatggcacattgatgaaaactactgatgtttgccacttattatttattcttttttcctaaatatttacaaaaattacttttctcttttgtatgccacatctgactatgtgtgttagtttttgttttttgtttgtttgtttgtttgttttttgagatggagtctcactctgtcaaccaggctggagtgcggtggcgtgatctcagctcactgcaaggtccgtctccttggttcatgccattctcctgcctcaacctcccaagtagctgggactacaggcacccgctaccacgccctgctaatttttttgtatttttagtagagacagagtttcactgtgttagccaggacggtctcgatctcctgacctcgtgatccacccacctctgcctcccaaagtgctgggattacaagcatgagccaccgcacctggccgtgtgttagtttttatatctatgttagtaccgcaaaaatgtctaagaaagcagacccttctaccaacactacaatgtctcatattgcaggaggcctcatagttaggaagacaactgttagcaaagcccttgtttctctcatgagccaccagtgtctggcatatctcaatgcactcttcatgatgctctaagctctaagttaggcctatggttgcattgaagctctaagttaggcctatgattaaagtcttctggctcataatgataaaagccattattgtaggcagttagaacctgttgaaggacagagacgtgatggattacagtctgagataatgtaagttgtttaaaaaagtgaaaataaaagaaaatcaaaactttgctttacctattcatttttaaaataaccaaggcataccccttttgctgtcttaagtttcagacaagggtgcaacttctacagtcattccttggtggctttacatgctttatttgccatgggccattaggtgctatgggtgttttcatccccactttggtgctttgtcaagacatcaagcatctccatgaatatactttaatctttcccttttttgtgttttgttttttaggtaagtacttttggtattcttcttccttaatgctgaaagaaaatgcagctgcctgatgtagaacaaatggcttttgaaagcaaaatccaaaagataaaaaataatgtgaacagtaaagaatgacaccataccagatactggtaagaattttaagtggcattcaaacacccctctctttttggagagaggactaacagtacaggaagatgcggggagggtggggagggattgttgccgtgcaagtaaaaagaaaattacagacagtgttcatgaaatattcatttacacctgcttattggttagatgaacagcctttggttctgagctggctcaccattcccaggctggaaattattcacttaaatgcagcttttaaacattttcttaaaatcctcaatggaaacagatgtgcacatgctgagggaacttttttttgatctttttctagaagagggttaaattagaaaaaaaaaccagtatttttaatatttaatttcatgtgtatagctatgaagctatatacttaaatgctttgtaacatatgatcatgaatatatgtataaacttcacccagaaaaatccataaagcttttgacaataaatgtgtataatctggataaatgaaataccagtgaactcaaacataatttatttcatgttttatgtcttctctttctcattttccatgtacaattcctgtgtacatatgaaataacatacaaaatacaattgtacgtatgcttcaatggcattttgcccaaattcatagtccttttttatatggccgtggatttcgagatttaaacatatatggtaaatagtatgtttctgttaacttcagcatagcccttttagtaacaagacattgtttactataaattgagattatctatccaatgtgagtaaatatattattaaaaatacattaacatttaagatgaacaaatagcaaaggttaaaaggtttcagagaccattacctgttactaaatcatttctctctcccatttactagtcttatctcattgagtttcctgctgtcctagaatgtcatccctctgtctctgctttatttagtttttgtctatattcaactcagaccctatatcatgtacaaagctttcctcaagtctttgaacacagactggtttattcctgccctaaaatcattttttaatagaatccatgtgttaattttctgaggctgccataacaaagtgccacagactgcaagcgtaaatagtaggaattgatttactgatagttctggaggctggaagtctgaagtcaagagagcagggttggtttcttctgaggcctctctcctcagcttgtagatggctgacttctctctattccttcacggggtctttcctctgtatgtgtctgtgtccttagctcctcttataacaacgtcacatttgattagggcccacacttatgacctcaacttaatcacctcctttaaaccctgtctccaaatatagtcatattctgaggtacgaggacttcaacgtacaaattttggaggtatatgtacgaggacttcaatgtatgaattttgggtataggattcaccccgtaacagcccatgttagtttctcacttcattattctctgattcttccatgtatattggttctatcttccctaacaagttcatcaaggataaggattgatcatatttcaagttttgtttacttcattcacagttcctagagggctggcatataatattaaatgctacatatttgttgtttgaaattactggaaaaagtagcataacaggaccaaatgagagcctctttttccaattattgctgactttagctcccttatctggacagaaaaaaacagtagcagaggtttgagtcaggcagtggtcaaatgaactgtctctgctttctttctgggaggcccaacagcattctcgtcagcaggagcattctggcgaaaggaaatgctgatctctgcaaatgggcaaaagtgtaaagagcattgaacccagcctcataccacagaaaacaatttgggcttgtggaaaataattacccagtgaagagtcttctgaactagaggcaggtttttggagggggaaatcataaacacatttgtggttgcaaggtagcagattgggtgagctgaaactaaaacaaattttggtttaagaaattgtattttaagttctgaagtcatacttaattcttaataattctaattgtacacacgctaatttaaatggaagatgtttacttcattaaaatttcaacactaaaatgctggttcagtttgttgtattactttcttcaggttttgttatattctatttttcataatttctagagccagcattcaaaagtaatttctgtgcttcaaaataggatcatcctaaattcaaattatatgtaaatgtcattgaatgcagatataaacatggtgccacaattttatagaaaattctaaaaaaacaaaacaaaacagaataaccatgttgctctcgtaccaaacgtgtctttgggtgggttactaagtccacctgagtctgagattctccatctgtaaaaaaggaatcagaatacctactttgggcagttgctgatattaaatttaaataagcaaagcagttagcccagtcatgtcaaaatagttgagcccaatgaatggtctttttctttatctctcttcaggttgaattttgcacagtagataatccatctatcacagaggtgtgcagatgtgactgattcattgattgaaacattcattgccccatttaaacaatgtttaggtattattatccactgtatcctggtttcatgctggatgttgggtaaataatgatgagaagaaacagacaactccaactttaatggagaaattgacattaaaagtctaaaaatatgtataaaattttaaaaaatcagtgttgtgtagtaaatatacacagtaccaggagattttataacagggagggtatgtgtaaaatgtcaggaaatatttctcctaggatgtaacaatgaggagagtttcagagtatgcatgtgtgcacatatgtgtatgtgcacatgtatggatatgtgttccaaaagtaatagtggttaaggtggtgatggtagtggtggtgtaggtggtgatggtggtaggagaagcaagagaatgaaataaataaaaagatgagtgtctgggaacagcatgtgcaaagtcctgatgtaggaaacagtactgaatggacagtacggtttaccaagggagggctggtgaggctgagatgaagagagctaacaggaagccagtaacttgagatgaggctagagaggagagcagaggccaactggagcaaaaccttatagacatattaggtcttctaccctaagaacaatgggaagccacctaattttaagagaaagcttaatggatgtgtgtgattcagtgcagggactgctaccgctcttaatcctcgaaatatcctgctaaccaggttggctttagtgggtggaaaagtgaggcccatacatattcaaatttgtattttgaaaagattttttttttgtcctccaatgcttttgccagaatatagaaattcaaagtatgtgtatttatagcaaatacgtagatgtttttcaccttataggtgtgtttttatcacattatttttgcacatatgattcctgcatgacccgagtgaaggggtgggttgcccctccacacctgtgggtgtttctcattaggtggaacgagagacttggaaaagaaaaagacacagagacaaagtatagagaaagaaataaggggacccagggaaccagcgttcagcgtatggaggatcccgccagcctctgagttcccttagtatttattgatcattcgtgggtgtttctctgagagggggatgtgtcagggtcacaaggcaatagtggggagagggtcagcagacaaacacgtgaacaaaggtctttgcatcatagacaaggtaaagaatcaagtgctgtgcttttagatatgcatacacataaacatctcaatgctttacaaagcagtattgctgcccgcatgtcccacctccagccttaaggcggtttttccctatctcagtagatggaacgtacaatcgggttttatagtgagacattccattgcccagggaggggcaggagacagatgccttcctcttgtctcaactgcaagaggcatgccttcctcttatactaatcctcctcagcacagaccctttacgggtgtcgggctgggggacggtcaggtctttcccttcccacgaggccatatttcagactatcacatggggagaaaccttgaacaatacctggctttcctaggcagaggtccctgcagccttccgcagtttttgtgtccctgggtacttgagattagggagtggtgatgactcttaaggagcatgctgccttcaagcatctgtttaacaaagcacatcttgcacaacccttaatccattcaaccctgagtttgacacagcacatatttcagagagcacggggttgggggtaaggtcacagattaacagaatctcaaggcagaagaatttttcttagtgcagaacaaaatggagtctcctatgtctacttctttctacacagacacagtgacaatctgatctctcttgcttttccccacacccgagatcttttaatattctaacatactcttatgttctaaatcagtgacacttagaaagaaatgttgacttgaacatccaagtacaggtgctaatttgacctagcagaaacattttttaaggaaatctctctgcactgagcacttgcattatctagcaatggaaaattcaaacaatagaatgattatcataaattcctttgaatacctttgttagcagagatgaaaccttggccacctggctttaagggaaagcttaatgagcatgtgattcagtgcggggactgttacctctcttaatcctagaaacatcatgggaaccaggtttgcatcagtaatgaatttttataatgtgaatctttgattttctttcgctggtaagaaaccttatttggagatgctatgtatgtgagtttaatctcattttccattccttcttgaagctttctaggttaaccacctgaaacagtggttactataatcagtaaagatttataaccaaagtataaggaattggggaatttccatatggtgtgtcctcacaaacaaacgtcatgtttcaatatgatatgaatgcatctccatccaaattattattttaactgtatatttttccctcagtcagcaatttatgtaacacatatatttcatttcatccaactcctaataagagacccctaaattaaccttgaactatgatttacaccttctcaatatacagtcaataattgaatttaatgactaaccaaggacattttagtcattgcaactgcttacaagattatatgtaaaggattcaggaataaatagaggggtctctcagtatgaagtttaaataaatacttaatgataaaagaaaaatttgtctgcagtttttttttttacaattaactttttacaagttattatccccttaggctcattccattctgctccctttgttttgaaacactgttatgacatactactgtcagtaatggaatgtcagaaaatagtacatatgaaagacacagttcattctactgttaaatattacatcattgaagggtttaaatcctaagacgtatctttgatttaccagcccagcccaacttcctatttgctctctgctccatttagtagatttcatgctggttgctggactaaacaagtcaaacacctgcaagggccctccatctgtggccagaaaagtgttgctggtggtatatttttgatgtttaggaagaaatattgatctgcttaactaagatggtcataagataatatggggttgtactcatctgattctcacaaaaccccagggtgctcagaactatactgatgtgttggagatgctacttaggaaattagaggaccagcatgcatgtcctttggaatgatgtatgccaccctatcatctgcttggccaacaacttgagccaagacacacctggggtatcttggtactacctagagaccctagctaattttgccagggtggattggtagaatccaaggaaatagttttgcaagtgacacaattggtggatgatataataagataatgaagactaaaataatttgaagaagggaaatggagataatttaggctaagttgttctatttgctattcttagaagtgttttcttcacatttagaagaagaacaattgattataaaatcactgctttgatgcattaatttgatcattctaaacaggtgatgaatattgtcttatgttatttgcctccattacttaatctgactatcatagaatagctaagaatacttcttaagaatgagagtttgcaactaccagtcacataggccagtatctgttaacaaaatgctagtaattttgttcattaaattttaaacattaaatctattattgcattaagacctattaaaatggacaataagtaagggccagatatatcatgagtagaaggagtccctttctactgagagcctatggaaaggacaactagattccagaaaaatctgttcaacttccaggatggcatactaggagaaataaattgggggtctaaagagtaataagcaggaaaaaaatctggttttctttgaggcaatgattagttgaagcctacacaaataaaccaattacaacattttgactgaactgagaataattacactggtagtcaactcctggggaaaaattatgaagttcaggctgtaagctgtctaggcttttattaacttgcattgttcttaactgattacaggcaaaaaggtcaaaacattttggcctacctaggtagccagatggtctagagataatttcttaattaccaaatgactgtgttttatagtgtcccttaggaaaccaagttttaaaactgtgtctaaagagaacctgatttaattttttgatgtttcttttatttttgcttgattatatattataatcattttgtaaaaaaaaatccaaacactacagaaatataacttggatgtttataatcttcgcttctctcttagataactatttctaagagtttttgtatacatatttagatttttgatacatgtaaatatatataatcttttttactaaaatggtaatttacaacatgcttttaaacaaacttttttttttacctaaaatttcttagctatttatgtcagtacatgttgctctatgaagttgtaaacagaacaaagcagcgtgctccccaagaggactcttagatatttgaaagtagcccataatggtaaagtaaattcattcctgactttgcttgaggaaactaacatcctctccatcctgccttgaggacaagtgtgttccttcatggctgacacatatcttggcagagcacatgtgctgcaacagcacacagtatggggtaggaacaggatttgagtgatttactaatcaagtgttggctagaagagaggagacttgtaccaccccgaccctgcatcatgcctcttgctctcctctttagggtgaatgtaaaggggaatctgcccagttggggtacagataaaccttttggttaccagactgttggggtttagatgtcaactctttataggaattgtctaggaaagtcagctgtccaggcttggagaccttaaggaagcatggaaagctgcagctccctttttccaggaaaaggcagtcacccgtcttcttggaagctgtatttcagggaggcctctccagatgggctgggggacactgccaactgttagcatattgtccagacgacccagcatgagctatctaggtcatgttcagacagtaccactcatggtgttctcttgcttaaatcattgttcctgagtagccttgaatagtaacaaatgtgatatcttgacatcatctggtggttgggtgacaactgtttaattttctaacacagttggtttctgcaatgccttttcccaagtaatttagtattgtcttatcctgctatgtcttccacaaagggaagatgataaaatctttttaattagcataatgtttgtctactttaattttacattaaaaatttgttatacttttattaaaatactttcacagtaaagttttaatccattttcctatggatttttcattttgtaatatttctttcccatttataatcatataacatatacatttaataaaagtatatacaatatatatcaagcatatatggtatatatactataattttgtctgttttctactttctttctacttatgtctattttctgtattttttccatatggacatcatttttcacatttaatgtcttcttaacattacagggcagttctaattgttagaaggcctccttatactgatggctagtttgactcattataaagtcagttattgttcttggttttatgtcttaacaaggcatcccctcctcgaaccttagaggaattgatatctgacttcacatgctctaggggatgccatgtaaaattttgtagaaatgtttagtattctggcatgtgtgtctctaactttgtcagatgattagagatctgtgattagttaacaaccacacaggactgaattagcttccttccgtaactaaaagaattgaacagattgagtaaattaagtggatgcctcattagctccacaaagtttattagaattagagtcaaaatctaatacagggctttggactactaatatctgctagctacctttgggatgatttcagtatcataggatcatctgaccaaacaagctgtctcaaattcctgttagagtgaaaccttggctggacattagcttcacctgggtaatattaaaatactgatacctggccccagcctggagagattttgattctattaaattgccagagttagggttcaaggcaaggtacatccagagttgacaaccactggatttgaagccaaaatgtatagaatgtgaaacaggtaagcactgttggaactaccgagatagagacaaacacattccaggcactagcctctgcttctgtcttttctgatgtaagaatatttcgcctctcagaaagttgcttcccaaatgaatacttttaaaaattaacctggttttttcagtacataagacagggtaaggagaaaaagttcacctggtttttaaaaacactattgtttaaactttaacagaattatcttctcaaaatacttagaaatggagtaaatgtttctgctttgataacactgaaaccaaagctagagagtacagttaaaagggccattaaaaacagtttttattctataaaaataaattaatcatcgaatattcattataaattcaatcatgaaggaaaatacacattaaattatttatactaagataaatataaacctctattggcaaacaacttcgtagttaatttttctaatttaccactttctgcatctcatgcaaattatgtcttcttgcattgccaataaaatatgagattggggaaggatgctgcaatatccatgagaaagtttcatgtaagtgcaagcaatcagatttcattgcagatccagagtagtaacactgacagaactatgtcagttaagctttctgcattatttttatgcgttgtcattttcttttggcagaggagagattgaggatttacctggtccagaaatcgttgtaggttaacaaggtaccaatctgggtttgtttttatccccttgcttaaccaatcgtacagttaattcccaaaatgtgttattttttaacatgcaaagcagttcaacaacgatagaaggtgtagggattccagccacagacagagcctgagagaacaaacaaagcagattcagaaagcaggcaagtagcgcctactttgtttcagtggtatgtcctctgcagttcaaaatccttcagtatctcttaattaattcatagactatttccagtgaggtttcactgagaattccttaatgtcaagagctctctctgtatcttaagcagttagtgtcattgaaatttacttatgcaatgattctttcaccaaatatgtattgaaggcttatgatgtgcaagacatgtcccaagttctggtaatacaatgatgaacaaaattaatagtttctttctacacagtttttggtttatcaaatttattacatgtttaataaatgttcattaagtgcataaatagtaaaagaatcaaagatgtgatttcagcactatgtatcaaaaccacagaatggctgagtgttctttttaaatccatgtatcatagtgtattagaaggcaaaataataagaaagcagatcagaagtcaatatggtccagtaacaagaataaggagtcagattagagtcacattaacggttcacattttcctagctgtgggactgtaggtcgttattttcttgtcttattttgtctttctgtttttctttctttcttttctttttctttttttttagacagagtttcactcttgttgcccaggctggaatgcaatggcacaaactcagctcactgcaaactccgtttcctgggttcaagcgattttcctgcctcagcctcccaaagtagctgggattacaagcgcccaccaccatgcccagccatttttattttgtatttttacttgagatggggtttcaccatgttggccaggctggtcttgagcttctgacctcaggtgatccacctgcctcggcctcccaaagtgctgggattacagacgtgaattctataggtctcatttgcaccatctgcaaatgtgaacaatggtattgtgttcatttacccattcagccaacttttcctgaacatctcttaagtatagggttcagagatatggtaggttgggtttcagatgaccaaaataaagtgaatattccaataaagtgagtcacacacattttggttttccagtacatacaaaagttatgtttacactatagtctattaagtattcaatagcatgtctagaagacaacgtgcataccttaattttaaaatattgccttgctaaaaagtgcttatgatcatctgagccttcagcaagtagtaatctttttgctggtgggaagtcttgccttgacgttgatggctactgattgatcagggtggcggttgctgaaggtcagagaagctgtagcaatttcttaaaaccaggcaacaataaagtttaccacatttattgacttttctcttcataaaagacttctctgcaacatgtaatatactgtttgataggattttaccgaatgtagaactttcaaaattggagacaatcctctgaaacccaactgctgctgtatcagctaagtttatataatattttaaatcttttattgtcatttcaacaatttttatagcatctttaccattagtagatttcatcttgagaaaccactttctttgctcatctataagaagtaactgctcatctctttgttgctgagattgcagcaattcagtcacatcttcaggctccacttccaatgcttgttctcttgctatttctaccatatctgcagttaattccttcacttgaacccttcaaagttatccatgagggttggaatcaacttttctcaaactcctggtaatgttgatattttgacctcctcccatgaatcatgaatgttcttaatggcatctagaatggtgactcctatccagatttttaattttctttatccatatacatcagaagaatcactgtagaaagtagccttcccaaatgtatttcttaaataataagacttgaaatactctttgaatcatggctgcagaaagaatgttgtgttaagcataaaaacaacatgaatcttgtgtattgtattagtctgttttcatgctgttgataaagaaatacccgagactgggaagaaaaagaggtttaatggactcagctccacatggctaggaaggactcacagtcatggcggagggcaaggaggagcaagtcacatcttacatggatggcagcaagcaaagagagagcttgtgcagggaaactcccatttttaaagccatcagatcttatgagactcatttactatcaggagaatagcacaggaaagagctgcccccataattgaatcacctcccactgggtttcccccacgacacatgggaattgttggagttataattcaggatgagatttggatggggacacagccaaaccatatcattccacccctggtacctcccaaatctcatatcctcacatttcaaaaccaatcatgcctccccaacagtctcccaaagtcttaactcatttcagcattatctcaaaagtccacagtcctacatctcatctgagacaaggggagtcccttctacctatgagcctgtaaaatcaaaagtaagttagttacttcctagatacaatgggggtacaggcattgggtaaataccattccaaatggaagaaattggccaaaacaaaggggccataggccccatgcaagtccaaaatccagcagggcagtcaaatcttaaagctccaaaatgatctcctttaactccatgtctcacatttgggtcatgttaacgcaaagggtgggttcccatggtcttgggcggctccacccctgtggctctgcagggtgcagcctccttcctggctgttttcacaggctggtgttgagtgtctgctgcttttccacacatggcgcaaactgtcagtggacctaccattctggcatctggaggatggtagccctcttctaacagctccactagacagtgccctagtagggactctgtgtgggggctccaaccccacatttcccttccacagtgccatagcagaggttctccatgagggccctgccactgcagcaaacttttgcctgagcatcctggcatttccatacatcctatgaaatctaggcagaggttcccaaacctcaattcttgacttctgtgcacctgcaggctcaacaccacatggaagttgccaagcttggggtttgcaccctctgaatccatggcctgagctgtaccttggccacttttagtcacagctgaagtggctgggacacagggcaccaagtccctagcctgtacacagcatggtgaccctgggcctgacccatgaaaccatttttttcctcctaggcctccaggcctgtgatgagaggggctgccatgaagacctcagacatgctctggagacattttcctcgttgtcttggggttaacaattggttccccgttacttgtgcagatttctgcagctggcttgaatttctccacagaaaatgggattttcttttctatcgcattgtcaggctgcaaattttccaaacttttgtgctctgcttcccttataaaactgaatgcctttaacggcacccaagtcacctcttgaatgctttgctgcttagaaatttcttccaccaaataccctaagtcacctccctcaagttcaaagttccacagatctctagggcaggggtaaaatgccagcagtctgtttgctaaaacataacaagagtcacttttgctccagttcccaaaaagttcctcatctccatctgagaccacctcagcctggaccttattgttcatatcactgtcagcatttttgtcaaagccactcaacatgtctctaggaagtttcaaactttcccacattttcctgtcttcttctaagccctcctaactgttccaacctctgcctgttatccagttccaaagtcacttccacactttcaggtatcttttcggcactgcaccactctactggtaccagtttactctattagtctgttttcatgctcctgataaagacatacctgagactggggagaaaaagaggtttaataggcttacaattccacagggctggggaggcctcacaatcatggcggaaggctaggaggagcaagtcacgtcttacatggatggcggcaggcaaagagagagcttatgcagggaaacttctgtttttaaaaccatcagattttgtaagactcatttactatcatgagaatgctgcaggaaagacctgtcccccataattcaatcacctcctaccaggtttctcccacgacatgtgggaattgtgggagttacaatcaagatgagatttgggtggcgacacagccaaaccatatcatgtatccatcagaactcttggatgaccaggtgcactgtcaatgagcagtaatatatttttaaaaatctttatataagagcagtagttctcaacagtgtgcttaaaatatctagtaaatcatgctgtcaacagatgtgctgccatctaggctttgctgtttcaggcacaagcacaggcagaatagatttggtgtaattctgaatggccccaggattattagactggtaaatgaacattggcttcaacttaaagccctcagctgcattagcccctaacaagaggatcagcctgtcttttgaatctttgaagccaaacattgacttattctttctagttgtgaaagtgctaaatggcatcttcttccaataaaagtttgttttgtctacatttgaaatttgttgtttaatgtagtttcaatgatcttctggataacttcctatagctttgatatcagcacttgctgcttcactttgcatttttgtgttgtggagatggcattttccttaaacctcatgagacagtctctgctggcttcaaccttttcttctgcagcttcctcatctctatcaatctttatagaattgaagagagttaaggccttgttctgaattaggcttttcttaagggaatgttgtggctggtttgatcttctatccagactactcaaactttctccacttcagcaacaaggctgtttcaatttcttatcatttgtattcactggagtagcactttttatttccttcaagaatattacttttgcattcacaacttggctgtttggtacaagaggcctagctttctgtctgtcttgacttttgacatgccttactaagcaagcttaatcttttctagctttttatttaaagtaagagatgtgctgctcttcacctcacttgaacacttagaggtcattgtattaattgacctaatctcaatattgctgtgtctcagggatggggaggactgaggagaaagagagagatagggaatggccagttggtggagcagtcagaacacccattaattgagtttgccatcttatataggcatggcttatggtactcctaaacaattacaatagtaacatcaacaatcagcaattacagatcaccataataggtattaaaataattttaaaagtttgaaatattgcaagaattatcaaaatgtgatacagagacatgaagtgagcacatgctgttagaaaaatggtacccatagacttgctctacacaaggttgccacaaaccattttgttaaaaaaaaaaaaaaagccatctctgcaaagcacaacaaaacaaagcacaataaaatgagatatgcctgtttcagtcactttgctatttaaaagagaaaatctgttaagccatagtccttgtcctcatgattcttacagtttggactggaagaaaatctttaggagtaaagacattaaatgtgatgaatgtttttgtgttggccttttacctatttattctcagaccacatattgccctttctctgccctttatagttggaggctacgctctgaaggctgtggtctcaagacttccatgtcctttgttagatagatgtagcacattggaggcactggtggacatttggggagaggcagaaagagagaagccagagtgttttactctctctacctgaggcagcacctcaggcagtagctgtgtctcctccatggcttcacccttagctaggtgaccctaatccttgcatacatcagccctcctttttagctctagtccaggggcggtagttgcttcctgttgtttctaacccctaagttgcctcacagtcccctatttggcatttcaactcttccatcaccagtgcaatgaatcagatctattaaatacactacttttaaaatgcatagagtgtttcttttagcttagtcggaagctgtttgataaagccttgataggagtggcagaggcggatcttatgttagaagtagtcaatgaaggtttactgagaaagtaaaatttaggctaaaacctcaagtgtgaatataaatgtatcaatggagaggggaagaatattctagatcagaagtgtccaatcttctgtcttccctgggccacaatggaagaattgtcttgggctacacagaaaatacactaacaatagctgatgaactaaaaaaaagaatcacaaacaaaaaatctcaatgttttaagaaagtttaccagtttgtgttgggccacattcaaggccgtcctgggcctcatggattggacaaggtttttctagatcatgtgcaatgggaaggaaaatgaggcatattttagaaactaaagatgtagacaactggaatgtgacatacaagagaaagaaggtcaagaatgtttgagggctgtcaagctcattggaagacattacagtggaatgacatgggcatttgtgttttttaaagtcagtggctgcattgtatagaattacttgggatgcaagcagggaaccatttagaagattattacagacagcggtgttggtatggagcagaatgatagcagaggcaatggaggaaagtgagcttatctgagagatagaggtaggaggtggagtctgcatgtcttggtaattgagagactctgtgaaacaagattgaggaaagggttaggattattttcaggattcaaaacagagcaactgggtagctgaggttctaatcacagtgagaaggaatattggagaaggaagagttccatggttgaacttcaggtatatgtcggttatccccagggagagctgtccaggagtcaggtgcgctgtatgtgtctggagctcaggaggcagatgcagaccaaagaaattgatggggagctatccatctacagatggtcatagaagttatttgagtcaataaaatcaactaaagggggtgcaagattaggagaacaagagagtcctgtctcaagcctaagaactgccaatatttgaagacaaagctgaaatgaaagacatgaacagagacttaagaagaaaaccaagaaagttaggtgctatggaagccaaaggaaaggagtgtttcagaaaggagggagtggccaatagcttcagaaatgttcattggtttagtgaaacacaagtcagttggtgacccaatgggagaaatttccatatagtaggagcataaaccagattgaagtgggttgaggtgtaagtacaaagggagaatcaagatagtgaatataaacaaaattatttcaagaaattatgctcagagtgaggaggaggtaagaagtatctggatagggaagtaggaattgagagggatcttattttgtacagtgaaaaataagtgcttatggaaaagatttggtaaagaggaggaaaagagtaagggaaaaatggatgaagctgcgtatcagagaatgtgagaaggacaaagaaccaaagcacaggtggaaggatttgcccgagttggtaacaggagggaaaatggaaatgatgactgtgggagtagatgtgtttgtcattttgatggctggacatggagaatgttcctttttgatggttactattttctctttgagtaggaatatcatctgctgtgtgtgggaagtggggactcaagtatttgagaagaaagaagaaggacgtttgctgtagtctttgcagaaaatgaaagtgatttgattaatagttgttagaatttaaaaatgtgtgcacagtgtttgggttaaagttgtttttaaaaaaccagccaccttgccttttattctttatgctgtgaaacctctttagagcactcagtcaccttttggccactagatggacacagtgtactcagtgctaaactgctgacccaccaggttccttttgttaccagccaatactgacagagtgattgagttgtgaacttattgttatgaattgaaacttattttagagaaaaaatcttaaataacacattccatcttacttatagttcataggtcagagaaagactgtggtgctacaaaaacattagccaatatattatttgctttcacgctaagtgtaatgtgtgtaacatgctatctctttgaaattttttgccttaaaaatgctaatcagttggcacaaggcgatcatttacatagtcagaatagagcttttggtttagcattttatcttaaaataaggcagaaatggcattgctctggatgtcagtatggtgcattataacccaagtggtggaaaaataactgctaaatggcaaacacatagaaactgaattctgctagtcagcttccatttggtagagatatgtgtgcccttgggtagctgcaatgttagctattattaatagttcaaatctttgcttcataaaagttctgcatatagtgttgtacaaattgaagtgattcaaggaaatcatagttctgtggagcttcctccctgttttgtagtggagattgggaatgggggtggaccataaagtaggtggttttttttttcctgccactcttaactaattacacaccctgccatatcccccaccaacataagacttcagactgagaaaacctacataatttaaccaatgttagaatataggcatttttaacgtgctgaaaacagtgttgttcttttggttcctaaactaaaatcatttgatacatttctctgtcctatgaaggaagccatgaatgctatgagtaaagatatttgtggcaggtaagaagagggagttaagtaagggagtttaatatgaaaaattcatataaaggctccaaggttaaataaggaatacttttgcacaatgggttcaaggttttactgggtagagcatttttaaagttttataacgacgttagaaggaatcgatttgggagaaaaactatatctgcttaatgtgagggagcactgtggaaaatttccagcacaaacttttcctgggcctcaacatttcttggtaatgaacctagatttggagtgatcaaataatttgctgtctcaagtagtaaaagggggactattactaacttcacaagaagacaggcataaacccagcaacatgtacaaagcaggatgatctcaggtaactcaggaagatgctggaacactctgggtgaagggcattaatgctgttcacagtggaacacaggactgctaatggtatttttatgcttttatgcatcaaaagcattgttctttgatttgtaatctctcacatatgtgaagcagggcctttcaatctggatttggggtcagaagacaacatgtggatgggaggcagaaaattataacagactcacctggggagcagttttttgttgttgttgatattccctagctgctgggaatggtggctcactcctgtaatcccagtgctttgggaggccaaggcgggaggatcacttgagcccagaagttcaagactagcctaggcaacttagcaagaccccatctctacaaaatttaaaaaaatattagctgggcatggtggcatacacctgtagtatcagctactcaggaggctgaaatgggaggatcgtgtgagtcctgaagtcaaggttgcagcgattgtgccactgcactctagcctggatgtccttccacctcccccgccaaaaagggatattccaaaactacaacattctactacattattctacattcttcctttttactctccatattgatacagaaacaaaacaaaacacatttgagacttaccactgcaaaagagtgttctttgaattgtggctgcaattatttctgttgcaaactttagtgtattattgttataatgatacttgaagtaatacccagatgtattgaaaattcaaaagacttcattgccagctcaacctgcactctcaagcactgcttactaagggagtaacaatgggaagagacaggtgtgagaacagaccccagagccagggaaatgaacatggagaagggaaataggcaaaatctcctcatcagtgtggttgagggaatattggggcatggcatggagagtcccacctcacttggcagccagagaatcttaaagcttattgtcaaaaaccttatgaaaggttagagaaggtaccattttattttacaaaatactttagcctttaccagctcaacatccgtgtgtcagcctgctttgaataaagaaatacacgtcttcttaaaatctgcccctgactacgatgagcttctttgtttcagcttattttgactaattaggctgaggttacaaaccaccctgatatttcagttgctacagccacagtcttatttcttgctctcattacttgttcttggctggatgatattgatatgttcgttttgttctggaaccaaccctaaatgagctgcccatcctgagaaggcagaagaaattgggagatggcaggggcacacagtgattttttaaaacttctgtttagaaatgccacagatctcttccatgcacatgccattggccaaagtgggttgcaagatcagcttggtgtcagtggggcaggaagtataatcctggcacaataatgggcttggaaagctgttaaacatttttacaataacacaatcagattctttcaaattaattacaaaagtacttaaagttttttacatacattctgtgcactgtcccaaagctatatctaatgttacttcctcattccgatgaattactattccttttcttcttagctgtgtttaaaagcccatacatctatcctgtgataatttgtacactgtattgtgcttggtttacttgtctctctccttccctcagtggtgggcccttggagggcaggagcaatgtgatattcatccatgagacccaagtgtgtgattggtgcacaatggacaccctaaaaagtgtttattgataattaatgaattaatagctaaatgagggagtgttttctttaccttccctacactcaccttttctccattccagcaagcaatcttgcacatggagtagaaatcacagtggaatcttgaagaataactagaaggttaccagatgagaaagtacagggaggtaaatcagggaagaacagctgatagattcagttgtagccatgttgagtgaaggtaagattcttggattttgcttcatgaactcgaaagtctacataacatcaatcttggccactgccaagtctgacccatctcacagcaccagaggattggggtagtaaactgcagatgtagcacccacaggctgaccagtctgaccctcattaggttccccaaaaatcaaatctctaatgcacctgcatggatgctgcaaaggaatgtgcactaaaggaatgtgaaagcgataactatttttcattatttctgatgagacattttagcaattatgttaaaatctgcacaaccaaaaagtctaaacagagcgtgaacctctgacattgactctggaaattacacacattttgttttactattttaaaaacacacatgaaccgaagagaaaagaggcagaaagactggctagaacacagcagaacttacccattaatgtaatggagtttgagcctttctcaatgatgcctgtggggagctccgtactagtaatatctcaaggatattgccattgttcaaacatttcagggattcccctcttgaacttaccttcaaaagagcctttgctacatgtttttgaaattcattgatgacaaatctccatctgttgaaggtttatctagttctatgaagctgccaaaagtcctttggcattaagcctgatgattaaagttgatgatccagttagcgaatgctattttgagtcaaaatgagaagtaactataaaattaagaggcagttttcttatgcacactggaagtgccctgtaatgataattcccaaagagaatgtcaaaaatgtctttaatcctaatagaattcactatatttttttcattgaaataaatatttaggaaacattggtttgaatttgcatatggtatacatgtttgaagaatcactcttgttactatataggtaacacttataagtgttaaaattatcaagttacttaagtacttataatgaatataaataaaatgatccattgatatttgtctatatatttttatacataaaagattgtatatgttatataatatatgtgtatacatatagcacaatgaccaaattaaattgtctttgcagctatttttaattaaaacattttcacattacgctttcttaaacaattgcctctgttatatcagaagccaaaactggcaaattatattagctcagttatttagttactggggactctatctttaaaccaaccatgggaattcatttatagctactcaacactcaggtatgtatgaccatggggcagacaaaagactgctttaaaaatcactgatgtgtatcatgctttttcttcttctttagtatttctagccatcaaaaagaaattatattgtgaggcagatggcagtaatatatttttcaaaagtgaattatatcctgtttccccatataggtaggtaaataaataaataaataaattctatataagcaacatgacataattcccagactatgaatttctgctaatctgaagcatttgattaagactggatttaaactatgcttacaagttgccggaaactactcaaaaaggctacattctgttaactgtgttatttttgtctgtattatgtcaaataattttgactaaatcattggtattatcaaggtcatgtagaagtcttcttaaattctgattaaataatcgactttctttacaactacagacaaattgcaacagaatctgtattttcaggcagttcagcctgcatagggtcaatttaataccatataaatgttgggaacagaattatcagaaacttcagatatgtcaccataagccagatgaacaatatatgtcagtaccattgggggagtatttgccagcataaactggatatgtttcttgaatgcatgaaaaatgtggtactgaatgattcttccttcactaaaattgacttatttatcttgatttaaatataggcatacattggtaaataaaacctaggttttttcataatatattagagaatttttgatacataacaaatgaggtaattccagatcgattggaattcaggtttagtgcttcgtaaagagttgaaaatagttcctggtaggtaagtaaattgtggtgggaaggacaggacattctctaaaagtgcttggttttagagatgttttggttaagagtttgaccaggtggtagcagatttactttttcctaactcagttttacttgaaaggccttcagattaaatacttacagaaccaggaagaaatgtatctgagttacagaacttgaatggggattgtcaaactggagaatgcttgccccatctgaaggagatagctggcaatatgtagggaggggaactctaggtatttttgtttgtttgtttgtttgtttttgaggcggactctcgctgtcacccaggctggagtgcagtggggcgatctcggctcactgcaagctccgcctcccaggttcatgccattctcctgcctcagcctccggagtagctgggactacaggcacctgacatcacgcccggctaattttttgtgtttttagtagagacggggtttcaccgtgttagccaggatggtctcgttctcctgacctcgtgatccgcccgcctcggcctcccaaagtgctgagattacaggcgtgagccaccgcgcccgactgggaactgaaggttttaaacctcctaaacattcaaaagaagcccaaatctcaactttaatgtgacattttctgtgtgctttaaatgttggatcaaaaggaaaaacaaaattaaaaatatgttggacaaactcaggcctgctgtccatatttgatccaaggaggaccaatttacccactctatcctacacctttcaggtcatagcattttcctttgttatctttcggcattaatgtcatattccaatttttccatatctatgagcaaggcccaaggtctgtagccaagcccagggtttgcatgtgatatctttagaaaaaccccagagaagctttctcttgttttctcactatgctgtaagtatgaatagcccaaagcaaaaaagacaagtaccctgactatcatgatcttctaagtattcatggagctcgctaaaattatagttccctgtgaagagcgtgtcgttgcagaaaagcactggagagtgggcttagataccttcctgtttgatctcaatagtttaatgtttactagctcactgagaagagactgccaccttagtgttaccctcttgtaccaccctaaacaagtcatttatttctcttgttttctctctttaaaaaaatttccatatgaaattctgtgattttttttcccctcattacctattttctatcatcattgtatccaaaaggtcaagagagagaaaaggccacttctccattgactggttatctcttagactgtatgacagcaaaaatataagcaagggttaaatttcaaatgcatccactctgctcatacacatttgtgatttaaaaaacacacttcattgaataatttaaaatatggttgtaccatctgttcttgtggggattaacattgttcatgatggcaaaataatcacgttaaataaattctagatactgcactcttattattaataatagcaatgatattgttagttcagatgacccggccttttctgtctccatataatcacactattgattttccagtattggaaaggagaacgagagagtacatgcttttatttctaaatggaacatgctgttcaggaattctgccatttcttttatggaaataaaaaataaagtgcaaacatatgccatctttgaaggtaacattatgtaagcctttgagtataacatttgctgtctttatctatttctttgtgtctattcataagaaaaatgatcagattgtcaaattcatattctagaaactacgcaatcaattttttttcaggcattctgtcgtctgcctggaatgagattagcaaaagagtcgttgtgtaaactgaattagtttacttcatgcgagcattgattttacattccctgaactcttataacattttatgtttgagccacacagtaggtactatctcacattgactgagaatttattgtgtttaagtcatttcttctaaaaagtattgtaagctttgtgaggacaggggccattttatttttctcttgtatctgttgaaatttcccactctgctgggtttttctaaggtcaaaataaattagaattaagtgattgactttttaatgttgtatagtggtgggaaaaggttaaaaagagttgcttttcgtagcaagatggtatgggccaatgacttctaccaacacctaattcggtgatataaatgatatactcttagcttgggcttttcctctgtgaacttctatggcaattgggtgtggacaaatgggtccttgaagatattttgaaaatttccccaacaagaacccagtgcttaatgaccctctactgccaggtaaccttcctaggttgctgcacctattccctctgcttttctttaaaatcacatacttttatatttcctaagagaaggtagaatgtaataggcatcattaatttttgcagaaagtctccaaaacatgttgttaaatcaccgctgtcttcttacctccaggcaaaaaggtaccaacttatttaaatatttgttcactcacattatgtgctcctgtgaattttctctgggtgtcactcttcacagtgagtatgagctctcatttaatctctttcaagggaaaatgagctcaaagaccctgatgttgcaacttgacctccttgagtttgtattaagctgttaacttgctgatttgtccctagtttatctattatgaaaacttggatgttgtcaaaccacattttcattccccagtctgtgttcactatttgatgttccccacaagttacactgccttggtctcaactaaattggttttctatattacaaagtcaatttaatatctgaatgatcttccaagatactgcctataatttcttttacttctctctcacaaagccttatctttcattaataaaaaatggtcccaaagcccattgttatcatttgcatttcccactttacacaaaactagccataatctcactatcacttgtctggtaactcaggaatatgctgtataaatagtgtattttttattttggtaaaatatttgcaaaagtatcttgtggtagctataatggatgtgtgaattggataaaaatactattaagtgtgttttttcctagttgaacaacatagataaagaatactgagtaaagactaaatatttgcctggatggaagaccgttcatccaatcaaacaaatatacagaaacataaagagatagtaaatacactggaatgcaaagtcagagtcaatagttatttaagcttgctaataaaaatgactgcaatttcaagtgcacagttaattagaattggatggtagaggcccaagggtgatggcatgtaaatgaagaatatgtgaggaattctgtcttaagccttattcatagatgtacagcagagaaattaagctgactgacattctgtgccctgcaatcgtcatatcacacctggggtgtgggattcatttcagataccacaggttaagaggaaatcaacaaggagcaatcagtccagaagggtgttgccaggatggtgaagcatctgggaatcatgatgtcttcggaactgccaaaagaaccgagactgatgtggcctggaaaagggagagaataaaaactcctgtttagataatctgaggttttcatattaaaaagattcagggccaggtgcagtggctcacgcctgtaatcgcagcactttgggaggccaaggcaggtgtatcgctggagtccaggagttcaggaccagcctgggcaacatggtgaatcactgtctctcctaaaaatttttaaaaaattagcttgtgcagtggcccatacctgtaattccagctactcaggaggctgagctgggaggattgctggagcccaggctgtggaggctgcaatgagccgagatcacactactgcacttctgcctgggtgacagagtgagaccctgcttctaaataaataaataagactcaggcttgtttttgaatgactatgatcaaagaatagcacttttagaaaggtgaaatttagtttgatacaaagaacttttcaatatttaaatcttcaaacttttcaatatttaaattttcgatatttaaatctgctcaaagataagcatttaaatctgctcaaagataagcataccatgaagcagggctcctcatgccagaaccagatatttgtttttccttcaaggctgttcatgcattaggggaagactgaatttcccatggcttctaatgaaccttttaactatgaggatctgttacatgaaaattttttttttcaagatggagtttcgcatttgttgcccaggctggagtgcagtggtgcaacctcggctcaccacaacctccgcctcccaggttcaagcaattctcctgcctcagcctcctgaatagctggcattagaggcatacaccactatgcacagctaattttgtattttcagtagagatggggtttccccatgttggtcaggatggtcttgaactcccaacctcagatgatctgcccgcctcagcctccccaagtgctgggattataggtgtgagccaccgcgaccagtgttacatgaaaaattcttagaatagtgcttgatggcaccaagtaaatgttcaatagatattagttgtaattgttatcagtagtgactattctatgcatttgtaactgattattttttggatgggaataagtaaaggtgtttaaaatgttagcaccggtttctgttgctaaataattaaggtagttagtaaggtcttaggctacttgtaactaatttactcttaatttgtcaccactttatgttttccattattgcctttacattctatgttacctagatttgggattaattcatcaaatttaatatgaaaactttaagtgactgctaaatcacaattgcatatattaaattatctagtgataacgtagcaatagtctatcaagaaaggaatgaatcatgaccgaaaaaatgaatctctttcattaattaagagagatgtttcagtttagaaacttacagaatcttaatggttaagctctaggtgacgttagcttcattggattattttctcaggtgacagatttgctacatcttaggatggcagctaatatctattgaaggtattcattcattcactcacttcctaatttatttaacaagcagtgtaccaaccactgcccatgcctgcacctagctgcttacctctacagagtgttttctacccttttatccctttttgagtcagtcatcacaggaagaccagcctctcagtcatcctatgtcccctatatcccaaccccaagggctccatggcagcaaagcagtccctcttctcaccccatccctgaactccttgggctccttccctgctgtattttcctctgtatcagttatcatttctcttatatattttacttactatgtccatttacctatctctactggaatgtcagctccataaaggcaggaatatttgcatgtgttctatttgctactgggtacccagagcctagaatagtaacttgataaatatttgttgaatgagtgaataaggcctaagtgtcatggaaactgataccagaaaggtgttatttcttccccagggttaccgaagccatttatggcagcgcagcattgtgacccaaagtcacttggctctgaaaccaacatccccattcttttttttttttttttttttgacagagtcttgctctgtcacccaggttggagtgcagtggcacgatcttcactcactgcaacctctggctcccagggttcaagcaattctcctgcctcagcctccgaggtagctgggattacaggtgtgtgccaccatgcacagctaatttttgtatttttggtagagacgaggtttcaccatggtggtcaagctggtctcgaattcctgacctcaagtaatccacccacgtcggcttcccaaagtgctgggattacagatgtgagccactgcacccagccccaacatattcattcttgatctctccctgcaagcaaataactttgaaattatgctgaataaactcagggatctagagatatttgacaatgacaatgatatttcactgctgtatggatttaaatacaaggagacaacttttgtatcatttacatttaggagaacattcaggtcaatatttgcctgcctaatttatctccatgtggatcacttttgtttcttttctagatgtattcaatctgatttagtttattatgagtttctctattatttgtttttttttccttggatcattgatgcagaccctagaagaggtggagtacagaaatagatttggagaagcaataatgagtaagcctcagtctttgcctctgagatgcattcagaagtggttgaggcaacattgtaagtgtgcagttccagagccagaagataaccagataatttataatccaagcaataatattgcaaaagtaaaaggaggcactatttaatcatcattccagggcaatagctgtatactattcagacaaactgaagagtaaagtcccctagtttaaaaactcgacaaacgtaaaatatgcttgcacatctttttagtaataaatatttaccttgcatctactattttcagagacacatactaggcactgtagcaatatatatagaacagtgtacagggcactgtggtgaatttaaagacaagtcatatatcttcctatcttgtggttcagaattcactttaggacagagaacattaaaaatacaataaaaagcagtaaatgatggtgcaagctgaattaagcttgatgtgatgttagccagccacaaggtttccaacagaattactgatatgatttggctgtgtacccacccatatctcatcttgaatcctagttcccattgaattatagttcatttctataattcctatagttccaattttatagttcagccaacaatccccatgtgttgtgggagggacccggtgggaggtaactgaatcataggagcagtttcccccatgcagctgtcgtgatagtgagtttctcatgagatctgctggttttataagcttctagtgtttcccctgctggcactcattctctctcctgccaccctgtgaagaggtgccttctgccatgattgtaagtttcctgaggcttccccagccatgcaaaactgtgagtcaattaaacctcttttctttataaattacccagtctcaggcatttcttcatagcagcatgagaacagactaatacgctgatgctgtaccacttttatttctatctcataatattgtcaattgaaatcagtcctgtcttgatgcatgaattgcacatcaaatgaattgtatgctttttttttttcctagataggagttatgccatctacttcttgtgtgtatacatagtacatgctcaattaatgctggctggctggttggggtagaaaaatgaattgatagatttaaaaaagtcatctggcaaccaaatatagagccttgtttgccaaagacccctcctctttgctgaactagctagttgacagagtaagaacttgcagcatgattattttttatcttacaactttataatgatacatttggttatttggaaataagtttaaagtgttttaattctttccactggttcctactgttggaaattcttttgcagctgaatattggcaaccgtttgtatcttggcaagtagactatgctttttaaggatgaaagtgtgggaagtagtataggacatctgtcgaagaagtcatgttgtcaaagcctgttgtgtatattaaactcatttgtttccatttctatacattctaaagcaaaatgccactccatttaacattcaaacagcttataaagagcttggaaatatgaattgtgtgggcctacctgaaatttcaatgaatgagcatcattttattcagttggttttgttgctgctttagctcagcctaaactttggatatataataggtttgttgagataagattaccagtagctaagggcttttgttggatgggagaattgaaaccagcataatttccggtacctgttaaatggcacttggaccaggcctaatttactgtccttgtatttaacaaagcagaacaaacaaaacttacttagatacctgattcactaacttcctcttctaaggtatccgtccatgtggttttctcctttacttaagtaggtttaataaacttgcctttatgtgaccaacgggtttctgttgggttttggaggcaatgacagttaatagtaaaataatattttgagagaaaccgctctcaaagaggctccattagctggagaataaagcatttttaaaaagatgagaccttatgcttcattcatctcaaacttacctgcttataaaaacaaaacagttgattgatttgatcaaaagttatccttgttataaaattaagtgggcctgctgactagctgatttatgggattttatgttctttaacttcgaagaagacatacaattcagtctcaacagtttttacaatctgagagattaggtcatgctaataaaatttctgagaaactacttatccatctgaatgttaacatcttttactagaatagtatgtttgtttcagttgatgaagacttttgtttggatgtaagctttcaactcatttagataaataccaaggaagtttttcaatatcattattttaatggattcatgatattcacattgattggctattccttattttaagtagttgggcattaaagatatttacatctttttattattttgtaagacactgtgatgaccttcatgatagttaaatcttcatttgcactgttatttccttctgactgtagccattgtgtgtaagactgcaaagtgtaatatatgcagtgtttaagagtagattaacaagaaaagctaatgtatgaacataagtagctgacccttaatagaagagtgtttaattaattttgaatttgccagtacactctcaaaacacagagcttgattaaataatggcattatactgagcttattcaagtatttggataacttttctttactgaactgaaactgatagcccaggcaggcacatctccaacacctctaattaaaatccacattcatcccttgcttcctgagaaaagatgttgctctcatgttcctttgggcactctttgcaaagtatttctgtttgattgcatatgatgaatagctccactacttccaatgtatttcagttgtcaaatatttataattattattcttgggaaagtaactgagaagggagttcaggaaagacttggacagttctttggagcatcaggaccttacaatttcagctatcttgttcaataagcaaatgttgttttaggttcctggattacaaggtcaaagaaggcagaattcctgccctcaagaaaagtcatggggaagagttgtaaatgcatgaacagctatgaaacagtgtggtaaagtcatgtgagttggcaaaatagatgagaggcttctaagtaaaactgaggaatgaagaatgttttttggaagagattacgcttaaaaggaattagccagccagagaagaaagagaaaaatgttcttgccagagtacctatcatttgggaagccccagtgggccagaagaacagactgtgtacaggaaagacactaccaagtgttatttgtggctgatacaggagaggaagggagagcaaaacaatagagcatctctgtgctgagtattggaatttaaattttgaacttcattactaaataatgtggaactattggataatttcaagcaaaggactcacatgttcatgtccttgcatgagtttgctaagatttccattttaagataatcttggtaggtaagtgaaggatagatttgaggaggaaaaaatggaaatattaactctaggcaaaacatagggggaaagataattgagagagattaaagaatgtgtagagaggtagaagatatagtctggtctctggaatcagatgaattggttcctaactctgactccaccacttaacactctatgtgaccttgggtatatatcttatccctcagtgtcttgtttttctcatctgaaaaatgagtataataatagggcccaactcatattttatgagaattagtcaacctgccaaccacagtgcctagcacattgaatgcatctgatcagtgttagctattatctattgactattaatattattgttactatcaatagtattcatgtctctagggtttgtgacctgattagcagttattgtctggttattggctgaatggtggccagtactagggaatataagaagaaatgtggggagagggagtggaggaggggaggaacacagttgatttgaattacattataaatgctcaaatgaactagctatggaacttacaagtggaattttctcatgtgcagctgatggtaacagcagaaaaatgtgaactctgaataaagaggtgggagtttttcagcacataaagaatatttaaagccaattcattggatgcattgaccagtaagtgtagagatcaaaatcaagaacaactccaagaattgagagcagatgcaaaccccaatttttgtgggtctccagtccaggtatgagcagaaaacacgagggttggggagggaaggagtcttccaagccataagccaggggaaatcgttcagtcaattcttatgctctgatgtggtcattaacagatgataacctcatcctaaagatgagacttctttaggaacatcctaaagatgagacttctttaggaacatcctaaagatgagacttctttaggaacatcctaaagatgagacttctttaggaacatcctaaagatgagacttctttaggaacatcctaaagatgagacttctttaggaacatcctaaagatgagacttctttaggaacatcctaaagatgagacttctttaggaacatcctaaagatgagacttctttaggaacatcctaaagatgagacttctttaggaacatcctaaagatgagacttctttaggaacatcctaaagaagttcctccagcatttaaaattgctaaacgtaggccagggtagagttaaaggctgaaagaaccttaattaatatgtattattccagttattagaagaaaagtcctatggattgaaattgctgcttgctggcaattacttttaattgctgtgcagggcattattaacgttgcaacgtctagcatagtgatgaaaattgatgttccagatgctttcatgtgagttctccttttcttttaatgttctcaagagcatagaatcatggggatgataagtgagatttttgctagactctatacctgtcttccatagaaatcccagtatgcaaaaacaaacaaaacatagatgggtaatcatggccattccttaataagatttgagccttatttggaggtaggcctggtatggatggtagctctaatctttagatgaaattaaactctccaatgtgttcttattttcctaaagatcaagtccccaactacctctctccagccccagagaaagggaattgttgacgatagaaagattccattttcttcccttaagggccacctcctgctagttggccagagttctcacagactctgaattcttggcaggctggagtttaacagtaatcctctctcatccaaatttaagtacaggtaatccccaggagcccctgccaggcttttggtaaataattacctgggtacaagcaaaaatgcccctgctaagaaaactctggaattttacccatcataggacacataggtctctaccatagaggtttatatcttattcttcaatttctgattgttacccctcctaggaaattcttatgtgaagcaaatcttattctcttctactgggcaatctcctaaattagctggcatgtgaaaatgcttcattgagcttttgttcttcagactctcaaatgaaggagtatgtccaaagagcctctttatgcaaaatctacaaattacaccccagtcatacatcacaattagttggcagtcattaggcattacatccatattgtaaaattagtgatgtttctcccaaattatgaaatattattcccattaagaaaaatatactgaagagtaaaaacataacagaatttttgctatatttattctcttcataattatgcaaattaataaaaattatttactatttactaactttgcattgagtgttctctcattctgatgagactccagacttctgccttttgtacacctgtgcaaagcctttctaagctgtttatttatgtcccaatatatatttcagttcagaaaggctgttcttacttttgcgacaccttaatagtagttttatttcatcaaggaactgtatgcaatcactggatatttcagagagctgcctaccttattttcatactataaagaaataaacttgaataacaatggatagtcttggcaggagtgtggaggagttgacatcttccaacatgactgtgggaatatgaactgccatagcctattaaagggaaaaatgttcacaatttgtaagctagcaatccattttcagaaatacaagcaccaatcagtaagaatatattagcaaatgtgtttattgtttatatgagtccaaaattatatgtccgtcaataaaggactcattgaataaataatggtacatttatgccatggaatcttatataactattgaaaagaactcactaggtctctgtgcattcacaaaaataattttttcatgattgacttaatattaataaaggattatacatagtatgagcccactttattcaaaaaggaaggagaatccctatacatgtgtgagggtttgtgtattgtgtgtggtatatttatatttgtataaataaaaagtttgctgtcttttccctcccattaatcctaccaaggaagggaaaagacagcaatcttttttatcttcacatttctgtgtcatttggcatgttaaaaaaatagcatgtataattttgtaattgaaacctaaaatataagaaagaaaattattgaatagaaatggtaaatactatgcagccataaaaaagaatgagagcgtgtcttttgcagggacatggatggaactggaggctattatccttagcaaactaacacaagaacagaaaaccaaatgccacatgatctcacttacaagtgggagataaatgatgagaactcatgaacacaaggaaggacacagaccctggggtctacttgagggtgaaggtgggaggagggagagaagcagaaaaggtaactattgggtactgggtttaatatctggatgatgaaataatctgtacaacaaacccccatggcacaagtttacctatgtaacaaaccttcacatctacccccaaacctaaaatacaagatttaaaaaaaaggaaaattatctactctttcaaacttaaaatttctggattttaacagtgtctgctgtttaaacccaaacagtgtctgaatttggctactgaagaataaaatgtagccctttttcagcacactgtatgtttacccaggtcccaggatgcttaaataaactggcgtgtctattcaaatcctggataagaaataatttttcaaaataaaaattatctcacagaatactctgaacacctgctactctcattaccctgaacacttgtggttttgttgctataactctagcaaatggcataaaggctagaaaaactgtgggataaagatacagcatttctctaagaccctgctgccttcagtagaattatttaatatcctttctaatttctccaacttatttttcactgttatgaaaaaacagcttacaaagaattagtaacattcactatcaatgattccatagatcttcgttcaaagtgcaggtagaaggtgcatttctcaaagagtgttttaaacgaggaaaaaaaatgtgtatcatcatcaacgttttagtgaataaagacattgcttaccgtttttatgttcctgagaggctaagttcagttctatcatgaatagtaatttatgaataagaacccacaatttttttaccagagaattggaaaaccgcccataacatttccatatacccatctcattttctaagtatctataacagtttagtgaacaatattccctcttcgaaaatatagcaaataattatttccttcctatcagatatgcatgctttgtttacaggtaaataactctgattaccaaactactattacattaggttgatgttcttttcaacgttagacaaaaatggataaaaccttgctgcctactcagagatttggtctgagtggaaataggcttttgtggagctacagaatttctgctttatctactcagccaataattggtcagagcatgagcctggttagaaataagcaaaaagcttcttgtatccatgaacagaatgaacagaaaacaaggtagtacatttagcctccgagaaacacgcgtttacttttgaagcaaagaagcaccgggcaaccagtgagcagcatatgtctgaaatctattatctgacatgttctttccagccttcccaggaatgctggtctgactactcagatttgcttttacttcttgccttttggatataatgagtttgccaagcagctgtgagtacctgactctggggaaggtggctagattccgaagcgcttatgttcatggatcaccatacgcgatcaacatgccaattgatattaagccacagaggagacggtaactgctttcctttcctctagttgtttgtcagtgaaaatgtgttttgttgccctttggtaactgctttggatgtctgctgaaatgggagggtcagggtgagaagttagtttttattcaacacactggatagttgggaaaaaaattaaccagagaggaaagctggaaatagtttagctatttagcaaaagctgatctggtttcaaggtctgtagattttaagaatttgagagattgtcagtgcttgtattgccatcaaaatcacccatgatgagaatttgaaagaggatttagccaaataatggatatatttattgatggctatatggctgtttataccagatgcccagtaactcataatctacatgtgacattccttaatgcatcataacacattaatgcaataaatgagttataattctacaaaaacatttgttttcctgtagttgctagggagggaagaacaaggttatgtatttttcctataaaaaagttgtcattttagatctgtgttctacccccgacccaccctttttatgtagtatcagaatagcgatgatatagttaactaatatgtccaaaagtcacccctcaattttggttttatacaacgtcattttcttcagcaattaacaatgaacttcagaagcatttataaagatgttccattctctctgtgaaaattccatttctccctaattttatgaatccacataatgaaaatccaaaattctaaaagcaatgtattttacttggaaactgtcattactatcttactcttctacttttctttttctaattatatctacacaaactcacaaagcatgcattttgccagatttcaccttattataaacatgaagggatgtttaagtgattaaaaagtttctaaaccttcagaaagctttctgatttttgtgagacaatattttattcttttctccagagtatcaaggcttttctgtccagctctatcactatttgactttatgaccggctagcagcaccaagcaactattttaaaatacattcagaaaagtgtgtcctaagacacccaacatggctcagttgctgtcagttacctcattcccttctttagttggtgggacgatactacaaatccatacaagttgcaaaatccacatgaatatctaatgtccctgttcatattaccttaatttttctgctttaaagtaatcaactttttgtacaagtcagtcaaattatgtttttatgtatattgtgtatatgcatagacccagaaaatttcagacatatacctatttaggcttaaaattgggcatcacagtgtattttacaagaaaatatatttgaaaggcattttacaataattagtatttaattgtataggtcttgggatttgtaaaaataccagatccatcttttctttcagtagaatacattacttacctatggctagtaaatcaattaaataaattttatataaaaagttaacttattacatctggagctttcattctacgaaaggataaatatgacaacaaacatgtaatgaaaacaatagttagaggggtggatgaatgaatggaagaacatccaaatcatagaggttgtctttttattctgttactcattttcttaagttgtaaattttaaaacctcaacttcttttgaatctgttgagaaaacaatacacttggaatggtgagtcatcatcttagattcactaaaatctacctaagttttgaatggttctttttcagaatgcttgctgggactaagatttatctaaagtagcatgtttatgtttattttcatatcatctcggttgtggtttttggcagaaagaaaattgttttctaattacttaaaaaaatctgaggaaggaaggatggaagggagggagggaaagacatctaaagaagagtagctatgagttgatatttcagcctacccaaagaagcagagattgcgggacaaaaaataaaagataaaaaaaattggcttttcacgaaaatccatagagaaaatgaagtaggaaatcaaatgcataagtgcaaaacatagctcgatttaaagctaagtatatccttataaaataatgacttcttgaaagaacagcatgtttttcttggaaaacagggaaataattcccaaattattagaaaatcacctagattagacacatgaccacatgatcatttaattggtctcaatttttatttcaagagcagcaatgaagacatcaagaaagcagttaacatactaaatcttaagtaaactcaatgttgacgagaatgacaaccctaccatctgtgattataattactttctatatttgcgatttaaaaatgttttccttttaatttttggtagcctctgtaaattgtactgtcccactttttcttttgtaagaaatataattttctttcaattttatgaagcttttatgtctcaattttagtatagcaatttcttttttttttttttttttgagacagggtctgtgtctgttggccagactggagtgcagtagcaatcatagatcagggcagcctagaactcctgggctcaaatgatccacttcagcttaccaagtagttgaggtcactgtgccaggctaatttttttgtttgtttttagagagactgggtcttgctgtgttgcccaggctcttctcaaacagttggcctcaaatgaccctcctgccttggcctcccaaagtgctgggattacaggcatgagcaatcaagcctggcccttcatacagagatttaaaaatcagatttaatctggctcttctaacccatcctcacccaattggactgtaaagtttttgagtgtgtggatcacgtcttggttgttgttacttccccagtgtccagcatagagcccagaacaggttaaataataaatgtttgtttaataaataaatgattagaaaatgcatggtacatattttggcataggggcgtgtgtgtgtgtgtgtgtgtgtgtgtgtgtgtgtgtgtgtgtgtgtataaaatcacttccctgtatgccacagtatggagtctttggcaagatttttgcttctgttattcatttggatcaattaaattccctttccttgtttccctgtagaaactgcatgtagcactgactttagattactggcttaagtggttggggatcatgcattttgtcattaccaggtcagcaaaggagaacctgaaataattcacttctgtattcataaaagtatatatttgtatatatgtaatgtgtgtgtgtgtgtgtgtgtgtgtgtgtgtgtgtgtgtgtgtgtgtgtgtatagcttcaagttgtagaaaggaggagaaaaagtcactgtgggaggtggcagaggggaatttcctagagggaaacaatactgcaactgtaagaaaatgtaagaaatttgatagaagcacaaaatttcataaaatcagttataaaaattatgacatataagccccagttctgttgtcttgctataatgtaaaagtcacatttttttttaatcaaaatggaaaataaaaactagtagcagtgaatgtggtgagacagtagccactggcaccccaaggcaatggaaagcaagtgcccttgagcactacttttcacagccgggtgtcatgttttacctcacccagccgccttcttccctgcattttggtggcttgacaccattactgtcggggcagggtggggtggtaggggggtgcttgtgggagtgctggtgagggtccttcccttgctgcctgctctgtgctccctctttctggtgatgcagctgttctggtatactctctggcctctgtttttctaaatcctttaggtaggcttgctctccctattatcgctgggatcagaaaaaaagcagggtacgaagatccagaagacaggaaggaatacagtaagtgtgagtgaaggtaaaccagcctgctctcttcttgtggaacgatcacaaggtcatgcacttagatttatgaccaatcatcaagctattaatttactcaaatggtgtattaatttgttaggacggtcataagaaaatactacagatttggtggcttaaacagcagaaatttgttttctcacaattccaaaagctgtgaaatccaaggtcaaggtgtcagcaggtctggcttctccttaggactctggttgtcttgcagatggccaccttctcactgtgttatctcatggcctttcctctgtgcgcaggcatcgctgggatctctgtatgtgtcaaaatttcctgcttttataaggacatcagtcagactggattaaggcccaccctaaaggcttatttaaattttaatctcctctttagtggtcctatctccaaatatagtctcattctgagatactggtatttagggcttcagcatacaaattttggggtagacacaattcagcccataacaaattgtgctcatgaaatgatttactaataatgattgtggagagagatagtaatccgactgtgaatcctgaataattagtggcttcatgttcataaaagtggactcaataatgggcatgaacctgcacgagggaggcattgcggagaagaatacgtcccattttctgtaccaaagaaaaacaagtacacattgcaaacaataaatctttatcaaattcaaccaccttattttgaactctataatcattcaaacgtggcctagactaacatttgcttttttatagcttttatcaagaggagtggaggtattaaaattattattgaggggtgtagtgattttcaactgacgcaattctaccctccacctctcatgcaggggacatttggcaatgtctagggactttttttattgtaataagtgggaagtagctgatgatttcaagtaggtaaagaatagggatgttaaatctcctataatacacacgacagcctctcacaacaaaaaattatttgacccagaatgtcagtagtgctaaggtggaaaaaaccttatgtgaatcaattaaatcagggagaacttcagagcttttttaagacctttatttatatctagatgattgatattttttaggtattcatgaaaatactttcttttacctttcttgtggtaagcacaagataacactttcttgcctggttaaaaatggacaactgctacacttttaaaataatataaagcattcagtaattcaaaccatcctgtcttctgatttgtctgaattagtgtggctttactgcattttcagggcttattattctttcagtagggagactactaagatttcattaaagatagctgaataaatgatcaaatacattattgtagctccagactaggtaataaacattgagatatgcttttcaagtagtggtgaaaatactaggcaaaattacacatacacttacatatattaagcgaccatcctgttggcctggtatgtgaagctctgctgaactcttgcctaaatgcatggacccatcgattgtgaatgtgtgactacttgtgtgttttcatcataaccagctcatcctaatagcaaatgatatggtttggctgtgtccccacccacatctcatctttaattatagttcccttaatctccacatgctgtgggagggaccctagtagcaggtaattgaatcatgggggcagtttccccatgctgctctcgtgatagtgagtgagtactctgaaatctgatggttttataagcatctggcatttcccctgttggcactctttctccttcctgctgccctgtgaagaagatgcctttcttcccctttgctttccaccatgattgtaagtttccagagaccttcccagccatgtggaactgtgagtcagttaaccatcctttctatataaattacccagtattggatatttttcatagcagcatgagaacagacgaatacagcaaagaacacgttttatgaaggaaaaactttgaaaacaaagggactactttctttgatgagaggcccttcctttcactttaaacaaaacttcaaattatcctcagaatttgttctaattctccctacttctgggtaaaaattattagcagtaacagatttaacttgaatgtatatctccagttccccattctcttctctatgtagtgctgccaaactcaatagatttgaaacaaaaattacccagggaccttccccatctcccatgtccttttttcttatggcccagacctggaagtcctcctaagtgcttcctctccctcagcctaaccactctaccactatccagttgcaggtacactcttcctccttcacctcaccctttgatgccatctccactgctaccatcttgggtccaaccctcatgttatcttgcctgaaaaccgctaactttataactagtctctgttctatcaacatcctcttcctgactgtcatccacagatccactttctaaaatgccatcatgacgcttccatgcttataccactagcttttcagtggctaccaaaaaaaaaaaaaaaggttacattcccagccatcatgatctattcccttccacatctctgcatccttgtaaattgcccttgtcacccatgtatactgtgtattttaggtataaataactactagctatacctattttttgcctagagttccattctctcctcattttgtgatgaatcccatcattccacagatctttcctagaagacctttcataattttctatttccaaatggaagtgcctccttaactagctgtttttcttttcttctgtgtctgttactgcactatcataataaatcttaatttatatattttctatctttcctcctccctaagagtggcatgatggaaagagttgtttcagaaaaaatttggcaatggaatgctgcattaattggaatggaaaagaatgaatccctacaccaacagaaggaagcagtgtgaaatcctgacagggacaatttcattacaattacaaaatacataaatatgtgattacaattgtgagaactgctcaaaaggaaacaaggacccagtgagagtataaaaataagtacctaacatagtctgagtgtttggagaatgcttccctggggatgatgaggcctgaggatgagtaacaacatactctgctgagaaccacatgaatgaagccctgatgtgttaaactaaaaggataaggtgtctgaagtgtaatgaggcagagaggagagtggcaaaaataaactggagaagatgagtaggggagactactgttttcttacatgctaattaacccaataattctttatttcattttggagagaaacaagtgattatttattaatttattcattggcaatgcaatttaaaaacatattctttgtgtcttatttatcattgaggtttttaaaacattgaaataaacaataggtaatattttccaactgagatttaaaaaagaaaaaggtcagttttcaaatctattcccaactgctagagtttaataaaaactgtcataaatgttgacctttgttctgcaatcagttcagcatttatccatcacccaaccatgcagcctctcgcttgccaaaaggagtggaatgagaattgttagagtacttggaatgtttactgtcagcaaagtacaagacactacacaatcttgatgacctttatatgatagtcccatttctatatccaataagagacattaaattacttaataattctttggaactttctttttagtttttcatggctttgctcttaagttgaagaaaattattacatggatgaactacaaacggaaagcttctgttatcaccttttatcgtactttgtaaactatgataaatgaagtggcgaatgctgacaaagcattccaggctcaggatggcacctttcaaaggcaaaagaaggtgaacaatctactaacagcctttgaaacaatagtcaggactttggacttggcccataatgttgtgtttcatattgccctaagaaggttgctctaggaaggaaaatagtttagtggtgatggagagaagggcccctaagggaagaaatttgatgagaaggatgttacaggtgtctaaggaaaaggtaatcagctcctcagacaagatggaatgtgcattgaatttgaaaagatggtcagtgcttcattcatgtggttctcagtagagcatgttgttactcatcctcaggcctcatcatccccagggaaatattctccaaacgctcagactatgttaggtgcctatttttgtactcttactgggttcttgtctccttttgagcagttgtcacaattgcaattacatatttatgtattttattggcctaagggcttcctcccacgttcaatcataggaccatggaaacaaggttgaagcctatgttttaaaccattatgtgtctggtgctttgtctgggtcctggtacataatagatattcaataaattcttgtaaaattcattttttttcaactgagagtacaaaagtaatcagacagtaaatatatgtgtacccttttggagaaacattaaattcattccattagcaggcaatgagttctttatttaaaaaaaagttctttcagcaacttccaaatgtacatctcaagctctgaccactcctcccctttagactcctactaactgcttggaaattatttcagttgttctcatggccaaaattgaactcatcatcttactcttaccatctggtctttttcttctatttctttgttggattgattactacagagttatctaaactagaaacacaggagtcaccttagtcatcttcctttatcttaacactgtctctcatcatcaagtcttcttttacctataatgttcttatatgagtcccttccactctgtctttattaatattgccaactgatgtgaactactgtaagagcctctgaagtgatctccacattgctggttttcatataatccaccccaaaggtctttgtgtttgttggttggttttcattgctatagcaatattcacatttctgcagtactagtaaattacactaaaacgtactgtgttttataattgacctcgagtataaacatacaaattctactgctctgatgtttctttctaagcaatggttgaatcaaaaaacaatgaatttgcctaattttcatgatgaaaacgttcaaaattctcctaagatttcttgaaatccaagcttgtgattgtatgagaattcacaataaaccagctcacaaaatgtataaacttcagtttgtcatagtctatgaggaattactgaagcatacggcatttactcattgatttttaattcaggcaaaagttagaaatacacaaacacatacgcgtacggaggtctcaaagtcagttgtgcgataataaattatttaactcacccttatgataggtaaacagttttcctaaatcgccctcctgccccctgctaccctgactgaaaatatgtgctctggtttgtgctgttatttttgaacaatgtatgccggtatccgatgtaagatgattcatatgatactggtgttaccatggcaatccatcatgtatatagcaagaacactgtgaataccagcagctctttgttctcttcaagtttccattttcttttcttgtttttttttttttttttcttgtgcagtaatccagtggctatgacatcaagagtaacacaatctaattttctccttctgttgcttgtggtaggattcatactctgctagcaagggagttcttggccattttgatttgcaagagattttgcttctccctgatgtttcatttcgtcagcaaagtcttccctctggggaaaaacccacttgaattctaaggctgatagatgctgggaatcccatatgatgagtcctgtggaagcaggacattccagccctggggttgctgttgtctctgacttcagtatatgttcaaagtcatctcaaaataaagtaggaagatgagtgttaacctgcacatcactggcagtttttaaaggtaaattgccatttttacttaccacactggattctccaagtcagactaggatttgggttacaatggggatcattggggttaaattacttaagggataatgagatttacacagacccattaatctttctaagctattgagaaattttacacgtactgtgactgaggagaacctgatactgtaaaagagcaattcagtacagtttcaccatccaaggacttaccgatgcaaattcaaatacacgtgctaagtaaaatgggagagatagagcaagggagatataaaaattccaayagagcaattccagatgccccatctgccaccacgtgcaatggatctatgttcactagtaagtgtgattgaggtaggagatgtggatctaccactcttcccatctcagttcctttggtgaactgttgagtgtgaacattttgccttacattgggtgattcaaggggttctccacggtaaaagtgactatgtcagattcttgccacataatctaagagatgactccactgaagtttgtgttactctaccatcaaaagatgtatctatgtttacagacattcttttattcaatttgaaaagaaatttcaatgtcaataataaatattagcctcatttgtgaattaaacagatgttaagattgcatgcacgtcagtaaaaaaactgttgtacaggaaactctatgcacaggagcctcctaccatgtcatccagctcagctacctttttctattcagctttctgcaagtatttattttatataatgcacatgtaactataaggatacaaacatggatcatacaaagaacctgccctcatggagcttaaaatctaaagacagatgataagtgctaaacataaataactgtccacaacattaagatatcagtaaattcattcattcatttaattcactcatacattcacttgtgcagcaaacatttactgaataggaactgatttcaaaattttcagctaggaatgcaaaactgagagagaaaaattcttagccttcaaaaaaatcaaagtcgaactgctcagacaaaaattcaaagggaaaaataaattataactacataaggactttaatagtcctctaggagtacattagaccaaacacctaccaccagctgggctattcagggattatcttacaaataaggtcatgaaagaggatgaagtactctcctgaaaggcagtgcctaaaaagagggtggctggcagagaatgaactcacattacatagcactttgcagtttgcaaagtagatagtcatatattgtttcctttgactatcacatcaactgataagaaaactgagacccagcagattcaaaggtcttactgaagaccataaagttagttaaatgtggccaggtgcagtgagtgactcacacccataatcctagcagtctgggaggccaaggtgggcagatcatttgaggccaggagtttgagaccagcctggccaacgtggtaaaacctctactaaaaatccaaaaataaaaattagccaagtgtggtggcatgcacctgtaatcccagctactcttgtgtctgaggcacgagaattggttgaacctgggaggcgaaggctgcagtgagctgagatcgtgccactgcactccaccctgggagacagagtaagactctgtctcaaaaaaacaaaaaaaaaattgttaggtaaatcctggagttgggacccaggcaccagtcatctgttctctaaatattgtcccatgtgttctgttaagtaccatggagaaagcaggagtaaaatattttggcagctctgagaagggagaatttactttcaactgggagtatcagagaatgctttgtagataaaatgacatttggtcttgcagcttgcattcagttatgcagagttgaagatgaagggcatttcaggctgggagaacaatctcacaaaggtgtggatgtaggaaaatacatgaacgtttatagaaaaaaaattgagtgtggtcagaatttattgaacttgagaggcaatcatgtagataggagataaaacaggaaaaggagaatgagactatatttttagggtcatgaaaattaagcaaaggaatattttctaaactaaggtgagctattaaagattttgaagagagggagtcctatgatcatagctttgcttatgaaagaatgaagtggcagcaatgaagacacaccttggaataccagaagactagagtaaggagactaatgaggggacttatagcaatcatttgctttgcaggtaataaggtggtaactaatacaagatgatggattacaatattaaattttgtattcttttaagttctatgtttctgcaatggctaaatgcaaacctatcaggaaaagtaaagcgttttgttgttattgttgttgtttttgcttttcaaaaagtgcaggtaattagggcctaacgtggaatggtccatgctaggaataaagtagatagcggcgaatgtttgctagagacattgtgatggactgatctgccctactattacatcctcagcaataaatatgaatgtttaagtggtacaattgccagaaatcagccaaagtttggcataattgttagagatttgttggctgtggatagaactacataattttggaattgtagaggagaacagagaagaaaccaacaaaaaatagtactagtactctgtcactggaaagaagtatgtttaaggccacacagtgaaagttagccatgagcttgagtgctctatcatttttcattatgttgtttgtttattaaaaaaaaaaaaggtaacagctttttctttttaaccaaacatttcttactggaagttcaataggtgtacagttgttttgtttggctagacatggatatttgtgtgttattccctttcagtagttctgaaaaccattttatctttagatacattattttcccaggagcttgggtattttattgaagctgtttcaaatgcatttaatgtcctttgtaatggatttctttatctcttccccaatgctcttggctggagatgttactttttatttgccttatcggtgtgagcacctcattgctataatcaatagatatagtactttagcattctgtacattttaatatgatatataccaaatataatgtataaatgaaaagttatagataatttttgcttaagttttcttttatagagaattgttaacaaaggatatacagccaatatgttaaaataatacctagaaattaaaaaggagtaaagtagaatagtttatctgttgtactaagacttcatacacaatatttcgaaaagtgggaatatctcttgggtgaaatacttcatatatgtattgtatgtacatacatgcaatatgtacacacagaattatataaaatatatgtatatgtatacatctatatgtacagaacatataattttattagcatttcttgtaatggcattttattataaatccaatgacctcaattattctatgggtaagtgctaagtatgtcaagagagctggcatagaaaatggaaaaagcactacaccccttagcttgcaagtagatgtgaattttctgcctttgactttgttgaatctgtgatgaatcatatgtttactctgattaacataaaacatctggatgatctaactttggggacacattgcttcatatgcactgaatgcctgaaaattggtagaattttagattctttttctttataaatgatactacccgaattcctgcaatacctagagagttacaagtgcttagctctgaccttttattccattcaattgaagttgtccacctttagtttattacacatatgactcttagtagagcaaacatctggattattgtcaacagttctcaaacacaccatttggatttcactatcagactacgaacgaacccccatggaaaaaaattcaggcatacaggctacacccagatcctgaatagcccctggttttctggttactattttctcaggccagatccaagaagtcctctttgggcttgtctctgggattctctgataaaattggctttagattgagactgacgtgaagatagagctggtcattgaaagacagaaacagatgtgaatgaaataattctcctttgagacataaaaaaatgtaagatataccaagaaaggggaatttgagttgttcattttctgacaactgtgaaattgttgacccggacaagagagtagggagattaacaatgtgatcatgttcagggcccactgtgccactgaattaagacaatgttggcattctcctcagtcatcttccgaaaatagagatttagagttaggaaaggaatagcctatcccattaactacgtcactcatctcatgcaggtgacctctcatttatgtatttctcaggatatagaccaacgctggagtatagaaatattatgagacacttcgtaattttaggtcttctggtaccacatttaaaaggtaaaaagaaataggtaaaatttatttcaaggatatattttatttaactcactgtatcagattattttaacttgtaaacaatatatataattattaatgagatatttaacattctttcctcatactttgtctttgaaatcctgtatgtattttttacttacatcacatattaatttggatgcccaattgtcctcaattatactggatctttattggacatttagatctcataagatttacaattagaaatatagattcacttcccaagttgttccaaatatagtattattaaatcaactatcagtcttttaattcataaatattaagtaagactaaaaatttagtcctttagtcatactaaccccctttcaagtgcccaacagcctcttgtggccattggctgccgtattagacagttcatatttagattatctgggtttgaactcagagtctgccactcactgactgtattggcaagttgttgccaacctgggcaagttttttctctttttatgcttcagtttcctcacctgagcacacctttttccttgaagaagctctcctgaagaaaatcccgtatttttcttcaggacattgctatttttccacttaaactcagaaccttagagtgatcactgaatcctcctctccctcatcagctttatctgccagaaggtcaagtcctctgagatgtacactgtaaaatctcatgctttcctgtgacttcatttccactgccactaccctctccttttgcatggatagctgcaatgatctcctatttaattagcctcagtctccagactctagccatcactccacattatgccctctggatgctgctactgagttcattttctgaaaatggtatctttatcatactctccacagttcaaactatttcttcactgcccgtcacttccagcataaatccatgtcctctgtgaaaccttttttgacaacttccatgccagatccaaatgacaactcccttccttgtgctgtcatggccctccacacagacttctgccatagccccagagtcctagtccacatataggagtacatgggctctaagccctacacagactattttgttgttgttatttttgttttgttttgttgtttgttcgatatcttgatatctctgtaacagagcacagtggtttcttgacagtttctcattttctgtatgagctagtgaatgacattcctttgtctggcattccaggccttcagaattagctccacttgactcttctggctccttctcttgcttttcatccacacagatcctctggtatagacaaactggtgtattactgtctcacaaatatgtccccaatgtttgtgtctccatgccttggctcgcatcctctcctcttctgaagtgtccctgcattcttcttgatctgcccaaattctaccctttcttcaaggtccagtccctccctcttccatgatgaagactgcggagcatgatgcaattcactgtgtttcaaattcaggattgggtggcctgatggaaggaggccaggcttggggtccaagtggatctgtttcttctgttttccgccaagttgcctaccctctctgaggttcacattccatatctttgaaatcacagtaacaaaacataaggtgcagaactatcttgagtattaagaataacgtgtgcactggcattcagtgagggttcagatggagcacgtgaactctgttactttcagtacagtcataggatatgtaatcatgtagcttctaaaatgtctttcattgtaagattttgttgtcatttggattgctatacaattcatgcttgatttctaaactagactgcaagtgtctggactgaaacaaatgcataatagaattctgagcagatatgcacagatatatatatgtgtgtgtgtatgtgtatatttgtgtgtgtgcacatgtatttgtagatatcaagggagagaggcactttcatgtgtattgattcattcagtccccacaagaaagcatcattctaggaggaagttgaaaatgtccctattttatctatgaagactctagacttgaagagtttgagtccttcccaaatcagtccaactcttaaagtgatagaagcaaaaaattcacagtgtttacacatcttttccaaagctgtttgatgttattatttcccgcatatcacatctgtgagattatctgcctagatcaatatatgtgctaaccatctgtcaatctttatctacatgcaattgtacccaggttcagggattgtgggagggagaaaggttaggtggttgtaagaaggacactgcatagtatggtaggcaaatacagaatacctgcaacaagacaaccatggcatttcttttttttttttttttttttttttgagatggagtctcactcagtcacccaggctggagtgtagtggcgcgatctcggctcactgcaagctctgcctcccgggttcacgccattctcctgcctcagcttcctgagtagctgggactacaggcccccaccactacgcccggctaatttttttgtatttttagtagagacggggtttcaccgtgttagccaggatggtctcgatctcctgacctcgtgatccgcccaccttggcctcccaaagtgctgggattacaggcgtgagccaccgcgcccagccaaccatggcattttttgttaggtcactcagcattggtatcaagaataacaaatgacacttgagtttctttttcctgaaaaagggcaggaagagtctaatagcaagtgcaattgccacaggcaacagtgttataactggaaaatcctaaaatgtagataattttcctccaaatgctttctaacaaaagatagacaagtttaaatttggctgatttcatatctaccataatatagtaccagcaatgccaagatacagaaaactgcctaagaaaaacagagttcagaagacttcggataaattatcatcttaagcttaaccttatacctataaaaaattcagggatatcagttatgacttctcattgagtagtctcatgttagaccaaaatagtttcccatattttggtgaaggaccagaataacttaccagtaaatgaaacaatcattttctttttgctttatactcattctgcatgtgatttgtataggggatcaagtcaaagattgccagtacaaagtaacaacctctcattgtattgcttaagttaatcattaatattttccatggatcaataccctgtagaagcatgagatgcagcagtgatcttcaatttcatgtgcttgccaagtaagaacagccatgggccagattgttgggagccgtgccatgagctacagaccctcagctcccctctataatcagttcttcccccactccagtgctcccaacttgccctaagcagagcgtaattgtggatgtgtaactaccgcagaggggagtatgctttttatgttgttcaattcttcactttctcttctgcaattgaaagttgagctgttagatttcctgaaatgaaatggtgacaagagaaagtaacagaagtagcctttataagtgcctgacttctgggtaacagaagtgacttaaaaaaaataaaagtacaaaacgttgcatttaatgtaaaagatgactgcattagtacaacccttgaaaacattcaagttcttttcagaataaccaccattaaggagttgacaaatattttatgctttaaagtatcctataaaagttcatcacagaaataaaaagcctcctgttcttatccttctcaacaaagccctcttgtatatagatattgagtctggcttacctctgtatcctgttgtgctgataaaccaagaaccttgcaaaaatagatgcacgataattgatatttaataagtgagcgaatccattaatgaaaagagtgctatttcagagagcagtgttcatttagatagatggtcccagcgtcattaagtaaaaggatagagaatacttgcaatacatttggcgtagtgttaagaattttttaaaatgttttaaatgtgatcttttttatgggctgaattgtgtcctctcaaaatgttgaagtcctaacccctggtacctcagaatgtaaccatggagataaggtctttaaagaggtgattaaattaaaatgaggtctttagagtggcccctaatccaatctgaatgatacctttataaagggagggaatttggactcacaaagagacattagacacatgcacacagagacaaccatgtaaacacatggtaagaaggcagccatctgaaagccaaggagacaggtctcagagaaactaaacctgttgacgcctttgatcttggacttccaaactgtagaacactgacaaaacgtattactgtcgtgtaagccacccaatctgtggtattttgttatggaagccctggaaaattaatacagtcttttttatttgctacctttgaaagccctcttgtcaaatgacggtaaagaatagaagacaataaagtgtcagtaataaagggtgacgagaagaaacaactagagatgtgagaggaccaatttaggaaatggaaaggagaggaaaaaatcaacaaagttgagaatgctaattacaaagtgcccacagaggagggcaaaaccagcaaaccattccctttgtcaaaatcttgaaagatggcaattgaggaaccaagaatcttaaaaaggggggaaggtggatgagaaatctgcatatgaaggggagtcctccataggttctcctctcaccctgctcagctaggagaccagtgccactttatcctcattagaatggaaatttatgctataaaaataaataagagaagtcttaacctggggatactaggcacattggaaggtgagagagtaaatgaaagtctatcaactgaatagtgaagttctgacttctctagtagcacctgggaataagaactctgtcagttagccttataatgccaagagaggagatagaaaaattgtttttctataaaaattgtctaaaaaaatatctgcactcccatgtttattgtagcactattcacaatagctaagatttggaagcaacctaagtgtcccatcgacagacaaatggatgcaaaaaaacatgcagtacctataaacaatggagtactattcagccataaaaaaagaatgagattgtgtaatttgcaacagcatagttggaactggaagacattatgttaaataagccaggtacagaaagataaactgcatatgtcctcactaatttttggtaactaaaataaaaatacttgaacttgccaggttcaggggctcacgcctgcaatcctagcactttgggaggctgaggcaggcagattgcttgaggccaggagttcaagaccagtatggccaacataatgaaaccccatctctactaaaaatataaaaattagccagtcatggtggtgcatgcctgtaatctcagctacatgggaagctgaggcacaagaatcacttgaacctgggaggcagaggttgtgatgagatcgtgccactgcactccagcctgggtgatggagtgagactgtctcaagaaaaaaacaaaacaaacaaacaaacaaaacacttgaactcgtggagatagagagtaggatgccatttatcaaagagtgggaagggtagtggggaggaagaataagatctagtatttgatagcataagagggtgactacagtcaacaataatttattgcatatttaaaagcaactaaaagaatataattggaatgtttgtaacacaaagaaatgataaatgcttgagatgatggctcctccatttatcctgatgtgattattacacactgtatgcctgtattaaaatatttcatgtgacccataaattcatatacttactatgtactcataagaattaaaattaaaaataaaaataaccaagaagaattcttcttcagaaaaatggaattaccacccagagaaaagacctatagtactggcattagatggttgcccaataaagaagccaagggtctttattcctcaattaccccatgtattaggccattattgcgttgctataaagaaatacctgagagactgggtactttataaggaaaacatgtttaattggttcacagttctgcaggatgtacaagcatggtgctggcatctgctcagcttctggggaggcctcagggaacttgtagttgtttcagaagacaaaaggggagtaggtgtctcaaatggtgagagcaggagtaagggggttgtgggagttagcacacacttttaaacaactagatctcagagagctcattcactcactcaccaagccataagggatctgcccacatgacccagacaccacgcaccagggcccatctccaacactggggattacatcccaatatgagatttggaggggacacccaaactgtatcattccgcccttggccccctaaatctcatgtccttcttacatggcaaaatggaatcatctcttctcaacagtctcccagagtcataactcattccagcattaactcaaaagtcccaagtccaaatacaaaatcttgtctggaaatgagttcctcccacttatgagcctgtaaaattaaaacaagttatttacttccaagccaaggtacaatagaggtacaggcattgggtaaacattcccattctttttttttttttttgaaatggagtctcgcttagtcacccaggctggagtgcaatggtgcaatcttggctcactgcaacctctgcctcctgggttcaagcgattctcctgtctcagcctcctgagtagctgggattacaggcacccgctgtcatgcccagctaatttttgtatttttgtagagatggggattttcatcacattggccaggcttgtcttgaactcctgacctcaggtgattcacctgtctcagccgcccaaagtgctgggattacaggcatgagccatcatgcctggccaacatttccattctaaaaggaagaaatcagccaaaagaaatgacttcaggccccacccaagtctgaaacacaacaggacagtcattaaatcttaaagttctaaaataatctcctttgactccatgtcccacatccaggtcacactgatgtaagggtagactccaaggccttgggcagctctgcctctacagcttttgcaaggtgaagcctccatgactgctctcatgggttggagttgagtgcctacggctttcccaggtataggatgcaagctgccagtggatctacattctgggacccacagaacaatggcttccttcccacagttccactaggcaatgccccaggggggattctttgtgggcagggcttcaatcccatattcccttctgcactaccttagtagaggttttctgtgaggactctgtccctgtagcatgcttctgcctggacacccaggctttctgatacatcctctgaaatctaggcagagactaggatcactctttccattctttctatctgaaggcttaataccacaaggaagccacaaaggcttacagcttacatgctccagagtggcaacctgagccatacctgaggctctttgagccacggctggactggatggaccatgatgcaaggagcagcctcctgaggtagacagtgtagtggtgccctgtgcttatcccctaaaccatttagtcctcctgtaccactgggactgtggtgggaggagctgcctagaagatctctgaaatgctgtaaaggcctttttcccattattttggctattagcacttgttctcttttagttatgcaaatttccctagcaaatgattgcttgcagcctgcttgaattcctccccaaaaatggccttttattttctatcacatagctaggttgcaaattttccacacttgtaagctctgcttcccttttaagtaaaaattccaagtttaggttatttctttgcttctgcatctgagcataggttattagaagcagccaggtcacatctcaattgcttcagtgcttagaaatgtcttctgccagataccctaagtcattaactcttaagttcaaactttcacaggtccctgggcatgaatataatgtagccaagttctttgctaaggtataacatgggtgacctttgctccagttctcaataagttcctcacttacacctaatactttgtcagcacggactttactttgcagatcactatcagcattttggtcatgaccatttaatcagtctctaccaagtttcaaacttttcctcatctccctgccttctcctgagccctcccaattcttccaacctctgtctcttacccagttccaatgtcattttgacattttcaggtatctttatagcaatgccccactccttggtaccagtcttctatattaggctgttgtggcattgcaataaagaaatatctgagactgggtaatttatgaagaaatagaaaattaactggcttgcagttctgcaggctgtacaagcataatgccagcatttgctaagcttctggagaggcctcagggagctttcaatcatggtggaagctgaagagagagcagctatctcacgtggcaatagggggagcaagagagagagcgggaaggaaggtgttacacacctttaaacaaagagattttatgagaacttgctcacaaagctataagggaaccactcccatgactcagacacctcccaccaggccccacctccaacactgaggattacatctcaacatgagaattggaggggacattcaaggaacaccaccctataatgaaccccaagactctacaagtccagttaaatcattcaaggctcccagtcagtattttagtgtctccctgttgaatatgaatagatagccaagtctccacaaaactctgaggaaattcttcaacaaaaagcctaatgcaaacaaatgaaaataatgatgatgattaggttgatataaaaagagtttaagaaacaaatagacgtttcagaaaaaataaacttcgtagccctagacagatgacaagttatcacattaatgaaacaaaaggatactatacaaaattatcaagtaagaacaaaagagagttagaatttaaaacaatgaaagaagatgctaataaataaaatcagagatgaaaagggagatgttgctgggcacaatggctcacacctgtaatcccagcactttgggaggccaaggcaggcagatcatgaggtcaggagtttgagaccagcctgaccaatacggtgaaatcccatctctactaaaaatacaagaattagccagcgtggtggcacgtgcctgtaatcccagctactcagaaggctgaggcaggagaattgcttgaacctgggaggcggaggttgcagtgagccaagattgtgccactgcactccagcctggatgacagagcaagactctatggggggggggggggggaaggaaagataaggaaagataagggagacgttacaagcaataccacagaaattcaaaggatcattagatgctactaggagcaactatatgcaaataaattggaaaacctaaaaaaatgataaattcctagacaaatacaacctaccaagatttaaccatgacgaaatccaaaacctgaacagaccaataccatcaagattgaagccataatgaaaagtctcccagtaaagaaaagcccaggatctgatggctttactgcttaattttgccaaacatttaaagaagtaatatcaatcctactcaaactattctgaaaaatagaggaggagggagtacttccacacttattgcacaaggccagtattaccctcataccgaaacagaccaaaggcacattgcaaacagaaaactacaggccaatactcccaatgaacatttatgcagaaatcctcaacaaaatactagcaagccaaattcagcaacacattaaaaagattagtcatcgtgaccaagtgggatttttcccaaggaagcaaggatggttcaacataatgtaaatcagtcagtgtgatacatcatatcaatgaaggacaaaaacatatgatcatttcaatttatgctgggaaagcatttgataaaattcaacatcccttcatgataaaaactcaaaaaactgaggatagaaggaacatacctgaacacaaggaaagccatatatgacagacccacagctagtatcatatcgaatggggaaaaattgaaagtttttcctccaagatctgtaacatgacagggatgtccattaccccttgagcaatcagacaggagaatgaaaggatattcaaattggaaaggaagaagtcaagttattcttgtttgcagatgatattattttatatttggaaaaacctaaagacttcaccaaaacactactagaactggtaaacagattcaataaagttgcaagacacaaattcaacatataaaaatcagtagcatttctatatgccaatggtgaacaatctgaaaaagaaatcaagaatgtaatcccatttataatagctacaaataaaatacctaggaattaacttactgaaagaagtgaaagagttctacaatgaaaactataaaacacggatgaaagaaattaaagagaacacaaaaaatggaaagatatttcatgttcatggattggaagaatcaatattgttaaaatgtacatagtacccaaagcaatcttcagattcaatgcaatctctatcaaaataccaatgacattcttcacagatatagaaaaatatcttaaaattcatgtataaccacaaaagacccagaatactcaaagctatactgagcaaaaagaacaaaactggaggaatcatattacctgacttcaaataacactacagagctatagtaaccaaaacaggatggttctggcatgaaaacccaggaacaaattcatacatgtacagtgaactcatttttgacaaaggtgccaagaacatacattgagaaaggacagtctcttcaataaatggttctgggaaaactggatatctatatgcagaagaatgaaactagacttctatctcttgccgtatacaaaaatcaaatcaaaatggaataaagacttaaatctaagacttcaaactataaaactattgaaagaaaacattggggaaactctccaggacattggcctgagcaaagatttttttttttttttttagacagagtctcactctgttgcccagactggaggctgaagtgcagtggtgtgatctcagctcacagcagcctctgcctcctgggttcaagtgattcttgtgcctcagcctcctgagtagctgggactataggtgcacaccaccatgctgggctaatttttgtatttttagttgagacagggttttgccatgttggccaggttggtctccaactcctgacctcaagtgatatacctgcctaggcctcccaaagtgcatggattgcaggtgtgagccactgcgcctggcctgagcaaagattttttgagtaataccccacaagcacaagcaaccaaagcgaaaatagacaaatgggatcacatcaagttaaaaatacctgcgtagcaaaggaaacagtcaacaaggtgaggagacaacccacagaatgggagaaaatattagcaaactatccatctgacaagggattaatatccagaatatattaggagctcaactccgtaggaaaaaaaatctgataatccaattaaaaatgggcaaaacacctgaatagacatttctgaaaagaagacatacaaatggcaaacagtcatatgaaaaggtgtgcaatgtcattggtcatcagggaaatgcaaatcaaaactgcagttaaatattatctcaccccagttaaaatggcttttatccaaaagacaggcagtaacaaatgctgacaaggatgtagagaaaagagaacactcctacacttttggtgggaatgtaaattagtacaaccactacggagaacaatttggaggttcctcgaaaaagctaaaaatagaactcccatatgatccagcaatcccacttctaggtaggtatacacccaaaagaaaggaaatcaatatatctgcacttccatatttattgtagcactattcacagtagccaagatttggaagcaacctaagtttccctcaatagacgaatgaataaagaaaatgtggtacatatacacaatggagtactgttcggccatagaaagaaatgagatcctgtcatttgcaacaacatggatgtaactggaggatgttatgttaaatgaaattatccaggcacagaaagatcatcttcacgtattctcactatttaagggagctggaaattaaaagaattgagatcctggagatagagattagagtgatggttaccagaggctaggaggtgtagtggatgggaggaagtaagaagtggggatgtttaatgggtacaaaaatataattagatagaacaaataagatctggtatttgatagctcaacagggtgactacagtcaacagtagtttatcatacatctcaaaataactaagagaatataattgaattgtttgtaacttaaagggtaaatgtttgcagtaatagattccctgtttaccctgatattattatgcattgcttgcctgtatgaaaatatctcgtgggccccataaatcaatcaatctatctatctatctgtctgtctgtctgtctgtctgtctgtctgtctacctacctacctattatgtaccaacagaaatttaaaatttaaaaaattatgttttggagacgtctagaaaaattggtgataatgtcacataatcaaataaagaaggtaatatataactccagaaaaaacaaaaagttgttccataaataaaacataattatggcacatcatttggtttatcagtaaacgttactttgcagggatgatacaatagaacactgaatgtttatttagccaataattgttatataactgtaatgggaggatagaaagagggaagtagagaggtgaaatggtgaaagagtgtgaaatcttcatcattcataatagaaagtcagttagaaatatggaatttaaaaaaaaatagtttgagagccttatgaagagggtggcacaaaagactcctgcaacttgttctaagccctgtgcatacaatttggggtgtgtgggttagtttaataattattttgtaaatataaaaggaaccaaagcaaccaaatttctggatataaatgtcctgtgttgattatcatgataataggtagacatcttggattggaattttttaacatttgaatggaataccccatttcccctttaatctttgataggtttaacatggtcactaactgtagagtagggacttgtcgtgctctttattggcagaagtgtgactggctacccctgaccgttcgggagaggagacatgtacacctggccaatcagaccagcagattcactgctggtgatgagtgaagttgcagatgtcagggacagcttgtgctgttcaggttaaattatctcacttcagctctcactctaaagatgatttataactagtattcttcactttcagtcttttcactagcaagcaggatacttatggaaaataattaggatgaaaagaggtcactctatcacaatagtgagtttttgaattcacactttaaacgagatgatcctccttaggaaaagcaaaataaaacgaatttccatgccattgttgattctacttgagttaaatactaacataaaaagttggttttctgtgcatagcctggagaatcttgtctctcagaattatcatgccccaggccattccttgcagattttgaattccctttgtctcaaaaacatccagaaaatctttttgaccttcgggtggttggcagaacatgtgttgtgagggcacctcagtttagaagaaaagccctgaacttagttcaaaagaagggctttccagcatgctattcattcagcttaggactgccaggcttcctgaaagacaggtgtgtcagaaacaaagtaaataaacagaaactcacaatgtccagacctttctctccagagcagcacagttcccttgctgagcggcaacagccaaggctttaagctgttccctctcccttttctgttaattgagaaaaccaattgctgcaagagcaacatcagcagagctaaatgtaaatggagtttaatagaaagagacaaataacccactgagaacccctaacatttcagtgtaataccccagagttccacaccataaacttggtattccagtataaagctcatctctcaattgcacgccaccctcccccatcttattcactctcttgcattattaaaggagtgatctcccccatgggatcaaaatagatagatagatagatagatagatagatagatagatagatagtctctaatatatgtattagaaacagagtctgtgttgcccaggctggagtgcagtggcatgaccataggtcactgtaaccttgaacgtttgggctccagcgatctacaggtgtgcaggtctacaggtgtgcaccaccatgtccagctaatttttaaaatttttgtagagacaggatatctctatgttgcccaggctggtcttgaactcctcttctcaaatgattctcctgccttggccacccaaagggctgagaatacaggtgtgagctaccatgcccagccataaacatgaaatttacttatgttttatgtataccatgtgcacatagcctgaaggtaattttacacaatattttaaataattttgtgcatgaaacaaagtttgtgtacactgaaccatcagcaaaggagtcactatctcatgtcagtgaccaaaaagttttagactttggagcattttggatttcagagcatcttgaattttaggtttttggatggggatgctcaacctgtatatatgcatacatgcatatttatgtaacatacataatggtacctaaaacttagcaaatactcatatgttagctattatttttgttggtattactatgaataataactattagcattttctctcatatctaaaatgcagttggtaaatgctaaactcataggaatgttgtaaagatttatttttttattttttttattattatactttaagttttagggtacatgtgcacattgtgcaggttagttacatacgtatacatgtgccatgctggtgtgctgcacccactaactcgtcatctagcattaagtatatctcccaatgctatccctcccccctccccccaccccacagcagtccccagagtgtgatgttccccttcctgtgtccatgtgatctcattgttcaattcccacctatgagtgagaatatgcggtgtttggttttttgttcttgcaatagtttactgagaatgatgatttccaatttcatccatgtccctacaaaggacatgaactcatcattttttatggccgcatagtattccatggtgcatatgtgccacattttcttaatccagtctatcgttgttggacatttgggttggttccaagtctttgctattgtgaataatgccgcaataaacatacatgtgcatgtgtctttatagcagcatgatttatagtcctttgggtatatacccagtaatgggatggctgggtcaaatggtatttctagttctagatccctgaggaatcgccacactgacttccacaatggttgaactagtttacagtcccaccaacagtgtaaaagtgttcctatttctccacatcctctccagcacctgttgtttcctgacttttgaatgattgccattctacctggtgtgagatggtatctcattgtggttttgatttgcgtttctctgatggccagtgatggtgagcattttttcatgtgttttttggctgcataaatgtcttcttttgagaagtgtctgttcatgtccttcgcccactttttgatggggttatttgtttttttcttgtaaatttgtttgagttcattgtagattctggatattagccatttgtcagatgagtaggttgcgaaaattttctcccattttctaggttgcctgttcactctgatggtagtttcttttgctgtgcagaagctctttagtttaattagatcccatttatcaattttggcttttgttgccattgcttttggtgttttagacgtgaagtccttgcccatgcctgtgtcctgaatggtaatgcctaggttttcttctagggtttttatggttttaggtctaacatgtaagtctttaatccatcttgaattaatttttgtataaggtgtaaggaagggatccagtttcagctttctaaatatggctagccagttttcccagaaccgtttattaaatagggaatcctttccccattgcttgtttttctcaggtttgtcaaagatcagatagttgtagatatgcggcgttatttctgagggctctgttctgttccattgatctatatctctgttttggtaccagtaccatgctgttttggttactgtagccttgtagtatagtttgaagtcaggtagcgtgatgcctccagctttgttcttttggcttaggtttgacttggtgatgcaggctcttttttggttccatatgaactttaaagtagttttttccaattctgtgaagaaagtcatgggtagcttgatggggatggcattgaatctttaaattaccttgggcaatatggccattttcacgatattgattcttcctacccatgagcatggaatgttcttccatttgtttgtatcctcttttatttcattgagcagtggtttgcagttctccttgaagaagtccttcatgtcgcttgtaagttggattcctaggtgttttattctctttgaagcaattgtgaatgggagttcactcatgatttggctctctgtttgtctgttgttggtgtataagaatgcttgtgatttttgtacattgattttgtatcctgagactttgctgaagttgcttatcagcttaaggagattttgggctgagacaatggggttttctagatatacaatcatgtagtctgcaaacagggacaatttgacttcctcttttcctaattgaataccctttatttccttctcctgcctaattgccctggccagaacttccaacactatgttaaataggagtggtgagagagagcatccctgtcttgtgccagttttcaaagggaatgcttccagtttttgcccattcagtatgatattggctgtgggtttgtcatagatagctcttattattttgaaatatgtcccatcaatacctaatttattgagagtttttagcatgtagggttgttgaattttgtcaaaggccttttctgcatctattgagataatcatgtggtttttgtctttggctctgtttatatgctggattacatttactgatttgtgtatattgaaccagccttgcatcccagggatgaagcccacttgatcatggtggataagctttttgatgtgctgctggatttggtttgccagtattttattgaggatttttgcatcaatgttcatcaaggatattggtctaaaattctcttttttggttgtgtctctgcccggctttggtattagaatgatgctggcctcataaaatgagttagggaggattccctctttttctattgattggaatagtttcagaaggaatggtaccagttcctccttgtacctctggtagaatttggctgtgaatccatctggtcctggactctttttgttggtaagctattgattattgccacaatttcagatcctgttattggtctattcagagattcaacttcttcctggtttagtcttgggagggtgtatgtgtcaaggaatttatccatttcttctagattttctagtttatttgcatagaggtgtttgtagtattctctgatggtagtttgtatttctgtgggatcgttggtgatatcccctttatcattttttattgcatctatttgattcttctctctttttttctttattagtcttgctagcggtctatcaattttgttgatcctttcaaaaaaccagctcctggattcattaattttttgaagggttttttgtgtctctatttccttcagttctgctctgattttagttatttcttaccttctgctagcttttgaatgtgtttgctcttgcttttctagttcttttacttgtgatgttagggtgtcaattttggatctttcctgctttctcttgtgggcatttagtgctataaatttccctctacacactgctttgaatgcgtcccagagattctggtatgttgtgtctttgttctcgttggtttcaaagaacatctttatttctgccttcatttcattatgtacccagtagtcattcaggagcaggttgttcggtttccatgtagttgagcggttttgagtgagattcttaatcctgagttctaatttgattgcactgtggtctgagagatagtttgttataatttctgttcttttacatttgctgaggaaagctttacttccaagtaaatggtcaattttggaataggtgtggtgtggtgctgaaaaaaatgtatattctgttgatttggagtggagagttctgtagatgtctattaggtctgcttggtgcagagctgagttcaattcctgggtatccttgttgactttctgtctcgttgatctgtctaatgttgacagtggggtgttaaagtctcccattattaatgtgtggaagtctaagtctctttgtaggtcactcaggacttgctttatgaatctgggtgctcctgcaggtgcatatatatttaggatagttagctcttcttgttgaattgatccctttaccattatgtaatggccttctttgtctcttttgatctttgttggtttaaagtctgttttatcagagaccaggattgcaacccctgcctttttttgttttccatttgcttggtagatcttcctccatccttttattttgagcctatgtgtgtctctgcatgtgagatgggtttcctgaatacagcacactgatgggtgttgactctttatccaatttgccagtctgtgtcttttaattggagcatttagtccatttacatttaaagttaatagtgttatgtgtgaatttgatcctgtcattttgatgttagctggttattttgctcgttagttgatgcagtttcttcctagtctcgatggtctttacattttggcatgattttgcagcggctggtaccggttgttcctttccatgtttagcgcttccttcaggagctcttttagggcaggcctggtggtgacaaaatctctcagcatttgcttgtctgtaaaggattttatttctccttcacttatgaagcttagtttggctggatatgaaattctgggttgagaattcttttctttaagaatgttgaatattggcccccactctcttctggcttgtagggtttctgccgagagatctgctgttagtctgatgggcttccctttgagggtaacccgacctttctctctggctgcccttaacattttttccttcatttcaactttggtgaatctgacaattatgtgtcttggagttgctcttctcgaggagtatctttgtggcgttctgtgtatttcctgaatctgaacgttggcctgccttgctagattggggaaattctcctggataatatcctgcagagtgttttccaacttggttccattctccccatcactttcaggtacaccagtcagacgtagacttggtctattcacatagtcccatatttcttggaggctttgctcgtttctttttattcttttttctctaaactttccttctcacttcatttcattcatttcatcttccattgctgataccctttcttccagttgatcgcatcagctcctgaggcttctgcattcttcaggtagttcttgagccttggttttcagctccatcagctcctttaagcacttctctgtattggttattctagttatacattcttctaaattttttttaaagttttcaacttctttgcctttggtttgaatgtcctcccgtagctcagagtaatttgatcgtctgaagccttcttctctcagctcgtcaaagtcattctccatccagctttgttctgttgctggtgaggagctgcgttcctttagaggaggagaggcgctctgatttttagagtttccagtttttctgttctgttttttccccatctttgtggttttatctacttttggtctttgatgatggtgatgtacagatgggtttttggtgtggatgtcctttctgtttgttagttttccttctaacagacaggaccctcagctgcaggtctgttggagtaccctgcagtgtgaggtgtcagcctgcccctgctggagcctcccagttaggctgctcgggggtcaggggtcagagacccacttgaggaggcagtctgccagttctcagatctccagctgcgtgctgggagaaccactgctctcttgaaagctgtcagacagggacatttaagtctgcagaggttactgctgtctttttgtttgtctgtgccctgccctgcccccagagttggagcctacagaagcacgcaggcctccttgagctgtggtgggctccacccagttggagcttcccggctgctttgtttacctaagcaagcctggacaatggtgggcgcccctcccccagcctcgccgctgccttgcagtttgatctcagactgctgtgctagcaatcagcgagactccgtggggtaggaccctcccagccaggtgcgggatataatctcgtggtgtgctgttttttaagcccgtcggaaaagcgcagtattcgggtgggagtgacccgattctccaggtgccatccgtcacccctttctttgattaggaaagggaactccctgaccccttgcacttcccgagtgaggcaatgcctcgccctgcttcggcttgtgcacggtgcgcgcacccactgacctgcgcctactgtctggcactccctagtgagatgaacccagtacctcagatggaaatgcagaaatcacctgtcttctgcgtcgctcaggctgggagctgtagaccggagctgttcctattcggccatcttggctcctcctgttgtaaagattcataaagttgatagattttaaatccttggaactgtgccttgtatatggtgaagaatagaaaagtgccatctttcattattttcaccaatagtaataaagcacaattgtatagtaaacttgtaatatagtatatgctcaataaattgttaattaacttttgtgttcatttcctagtgcatatatatcactaagggaattgatactaatgtcattgcatgcattaatggtaacattaattatcttcttacacattgggcaaaaaaagaaaataccaggctgtcagaacatcttggcccagaaacctcccttcagcaaaaagacaaaaatgtgagtgaagagaatatgcctttgagaattgagagggttgcattttgcctattatgtatagagatttgccaatttccctttcacaaactatgacagtgacactgattctggatgagcaacctgcataatgcttcaggggcacatctcttcttctaaggctgcaggcttgccgatgagacagaacacagcctcaattccatctgctgtcatttatctgccaatatagatagcagatctctgtgggtcttggactgctcaaacgacacagtatattttagcaactgaaggggaaccacttgagatcactaaaggtggaaaacacctgatgacaccttcaatcgaaagaaatgagtatccaaaatctgaaacattaggccccacagtacaatggctctagtgacagataaaaaatactatttctaacccttatagaatgaacttgttttcaagagctcaaagaaaacttttatcacatttatcttccacttttaattaaaaagattatttctgaaatgctaaaacttttgttttattcatgttttagaggaaaggagaggaagagaaaccacctgttactttcttgatgctgtacctggcacctgcccttgattgaagatgagttttgcatggtgtctgaaccaaaaataacaagtcctttaaaaattattgtcctaaaaaccagcagatcaaactactttcttttttctcagaggattcacaaagtatattgtttggaaaggcaaagtcagtgaagaaaaaagaggaacgtccctaaatattggtgttgtcatttataatgtaagacttcactagaatgagattatctcaggtgtgaatggagaaaggtaggatgcatgcagtgtggaagcagccagattcaacacactaaaatcattaacacatatgtttgtgtagttgtgtgtaattttgagggggagaagaggaattttgcctttaattctcactccaaccacttgaccaataattgggaatcatctcttttatcccctatttttgccccttgttctatatgttatttttttgagatgttctttatcataaagtgcctttacgtaggcagtatataagcagtatgcaaaattgagtccccatctctggcattgatctcaaagtcctttttttgttgtcaaatacctttgaatctgtgtcttcaaactctgcttgggttcactcaaatcagtatatttctttccatatgtaggtcttttgatttttgtcctaggttgactctttcctgagttcccttttacatcagaaattaacattttcctaattatccagtctagaaattttagtcatcattactttttcttttcattcatttttaatatccaatccatcctcaggttcaattaatcctttcttcaaactctacttcccctgtctttcattcttcagctgagttcacatcacataggtcctcatccattcatgccaggacttcgacagcagatactaacaggcatcaacctccagactcgttaaattaatcctacacactatttccaggtgacttactgaaagtcttcatttgatcctgtcactctccctttcaggactcttccagcaggtcacaactcacatatctgcaggagccaggagctattcaaatggagaaggcagggggatcctgggcaaggagggtatagatatatcctcacctgcatgcgcagtgacttctgagctcctcacagttgttatcatgtgaaaatataggccagggttggcaggctttctgatttttcaagagaacacagaaattagacttttaaaaagttgattcaataaatatgacaaggtatattagggttctctggaagaacagaattaatggaatatatatatatatatatatagacacacacacatatatataaagggtagtttattaagtattaactcacgtaatcacaacgttccacaataggccatctgtaggctgagaagcaaggagagccagtccaagttccaaaactgaagaacttggagtccaatatttcagagaaggaagcatccagcatgggagaaagatgtaggctgggaggctaggccagtctttcttttcacatgtttctgcctgcttatattctagcagcgctggcagctaattagattgtgcccacccagattaagagtgggtctgcacactgactcaaatgttaatcttctttggcaacaccctcacagacacacccaggatcaatactttgtatccttccatccactcaagttcacactcaggattatcacagaaggcatactatgttctgagctttcttctctgtactgtaaaaaaaaatacagcagtgaatgaaacagacaaaaattctacccttgtggagtttatattccagctgggagtgaaagatgaaaataatttatatattatatatatatgtaatatatagaaatatatatttatttatatatctatatttaaaaatatgtatggggaagattttgtgataaataccatgaagaaaagtgtattagagaagaggttaacgaatgtgtgtgtggtgggtggtggaattttaagtggtgttaggaaagacctcattcagaaggtagcatgtgagcaaacatgaaggaggtacaaaaagtcctcctgccatcatggagggacagtaagaaggtcctggtggctggagtgaagtagcaaagtggagaataagggaaaaagttggagatgaaacagaaggggactcagagctctattcatcttactagtggctttgccttattaaacaaagacctttaaacagatgttaacaagatccctctgactcctaatttggagatgactttaggggaataagggaagaaagagagatcagtgagaagcagaattctttttttcagggtctttctcattgttgttctcactaccatcatcctttggacagacaggtactctttttaagtcaatttgatctaaatgtgggttttaaaaaaatccttttctttgtttaacagctgagacaaagcaggaattttaaagcaacactttactgacaaactatgtagaatcaaagtaacatgaaactagataatttgttctatcataggagatatcttattcaaatgaagtcccctaggagaaactcttcttctgactccctcttcacactggacagcagaggccatctttaactttcccacaagagagggctccacaagacatagtcattactcaagagattgagaatcaagacagagaagtttagtctcctcctatgcttacttaaggctcacctccttaactctgatttcctctctgggaaatctctattcctctggtgactgtatactgggatttagtacaacatttagggaagtgcaacctactcaaaatatccaaatatagcaccataattctaacactctaataagaggcacatccacgtattttcaagggtggggaaagatcattaaataacagtatgagttatattatgttctcagtaaatattagttaccttttcttcctcttggagtgacttttaccaccctctgtaactcatctagccttatctaatgggaggccattttattttgggatggcatgactacataatttcaagctatttcttatgttatttgccgcctcttaaatatcttccccttacctccttctcatacaaaccttaaagttcttcataagtcacaacaacttataaggtcttttacctaactgaaccgatgtcttctctttgctgtacatttacatgtctataacaatcatttttcatttaaatatgaaactcttggatataaaaatattaacttgaaaaatagtaaccctgatttgctctttatactttaacaccttttgtttctttgtttataaatccactgtgcaaagctgtttatgcagcagaaatttagtaaacattctgtgaatgtctgaaacatccattcatcaatccactcacacaaaaacattaacatatactttgtcatgcattgttagatgttcaagcatgaaaatcaaacagtagtgaagaataatttattgtaaatattatttttcagggaagagaacactttagaaataacttcttgagaaattggtttgggaaaatagtatatccaaaattagagagcgccatcttgtgggcaagtgagtatctcacacaaataataactattataagttgcaaaaatagaatttcttctctttttttcttacaattcaaatctcctttttactgtaaatatttgtattgatgcataataattatacatatttaggaggtacatgtgatattttgattcatgcatacaatgtgtgatgatcaaatcagggtatttaagataaccatcacctcaaacgattattattttttgtgttgggaacacttcagctcttccagatattttgaaatatacaataaattattgttagctatagtcacctttctgtgttatcgaacactagaacttatttcttctatctaactatatgcttgtacccattaactaacctcttttcatcccacctctctcttcccagcctctggtaaccatcattctactctctacctccaagagatccactgttttagctcccacatatgagtgacaacatgccatatctgtctttctgtgcctggctcatttcacttattgtaatgacctccagttccatcaaggacacttaggttgattccatatcttggctattgtgaatagtgctgcaataaacatgggggtgcaggtgtacttttaatatactgatttcctttcctttgaataaattcctagtggtgggattgctggatcatatgatagttttatttttagttttttgagaaacttccatactgttttctattatggctgtactaatatacattcccatcgtcagtgtataggagttctcttttcccagcacccttcccagcatcaaataaaatcttttaaagaggctctgtctgtcctagctgaagaactgaaaatatatattaaaattttatataattaatgatattttaaacaatccttagaaactaattgtaatatttacaatttacttttaaatttcttgaatagctaaaaatgaaggctcagcaaagaaattactaaatatcataaacatgacatacttttcataagaaagcttataaaactgttaatgaaaaaggagacagaattcttagagattatctctttaaggggtctatcactttttgggtatctcagggtgctttgaaaatttgactagatcaaatctctcttgaaaaatgtaaatgtacacacaatttttcatatagtttcaggggcttcaccaactcccctgcggttgactcatgaacccattcatgaacttcatattttaaatacttacattttacataatatacaattaaagtctagaaggtttgggggtaaaagctaaaatttgattccattatctcttcatccccaaaacctcatgctcacacaattttataagattgatatagatagatcaaatcatgatgaaatatatttgctacatcgtttgagttcctaagctaaatcttaaaacttatagtttctaggctattaatgttccttacatcaacaaaaataaatatttaatattaggttcatgtcattcatggtatatctgtcacaaatacccttgatgtccattctatccaaaataaaagatgttattatggatttccttctttttcagggctgggtagaattctagtgtgtgagtgtgtgtgtgtgtgtgtgtgtaccacattttctttatccattcattgttgatgaacacttaggttgattctgtatctttgctattgtaaataatgctataatgaacatgggagtgcaaatatctttttgacacactgatttcacttcctttggatatatacctagtagtgaaactgctggataatatggtagtactatttttagcttttaaagaacctcgatgctgttttccataatggctatgtgaatatacattcccaccaacagtgtaaacatcttcccttttctccacatccttgccatctttcatcttttttgtactaacaggtatgagttgatatctcattgtggttttagtttgcatttccttgattattaagtgatgttgaacatttttttcatatacctgttggccattggtatggcttcttttgagaaacatctgtttagatccttttcttgttttttaatcaagttatttgttttcatactattgacctttttgagttccttatatattttggaaatcctgtcatttgggatcacatggatgaatctggatgacgttatgttaagtgaaataagtcaggcacagaatgacaaccaccacatgatctcatttaaatgtgaaagctaaaaatgtcaaactcatagaaacagaataaaatggttgttaaccagggctgatgggtgggggctgaagactggggcaatgttagtcaaaggacacaaaatttcagttaaacaggaggaataagttccagagatctattgtacctcagggtgactatagttaacaacaatacattgcatacttgaaaatagctaaaagagtagatttttagtgatcttgccacaaaaaaagataagtttgtgaggtaatgtatatattaattagcttgatttagccacttcacaatgtatacatctatgtaaataaaatgttttacatcataaatatatacattcttatttgtcaatttttaaatatatatataccttttagaattacagcttagccttgggttaatgaagtcatgacagtacgaggtttataaaactgaacaaagaatcctaaccatacgccaccctaactatggaaatacaatggaactattagttttctgtttcctctttctttctcattgagaaatcatgtcccttcataaaatccatttctctgtgtcagatcattggagctctttttttctccattattatttataatagttagtcttattcatctcttgctagtatgaaccttagtaacctaggttagtatttcccaaagtaggttttgtggaatgctaatatcaacaggtactacctgcaaaatggttgcatggtcaaataagctgagcttcataaaattaaactgatatattactggaagctaaataaatattgtaaatatccaggaaggagatacataggcaaaatattccaaactttattaaatagttaactttttgtttgcttacagagtaatggggttgggtgctccacagagaacattatggcacatgctgaactagagataaaaaagatagatttaaaaatatatgcagattgcttggacaaatttcagcaggatagtgagaaattgatttctagtgtagaatattctgggaaatgagatttttttacattacgtgatcctaattcaaatattatgattaattttaagtaagcaggcaatttgatgtaatggagaaagcactcacctgaaacagagttaacatgttttattccttggtacagtcatgctggtttttaagtgtttagcaattcattttacctctccagctaaggtaaaggaattcttgtaggagtaatagaagccctgtgattagtataaaacttagattaagatgctttgtgcagcaattcccatggcatatttctttttgtcttttctctttctctttctttccctccctccctccctccctcccttcctcctgcgctgccctgcccttcttttctttttctttctttctttcttgacaaggtcctgctttgtgccccaggctggagtacctgggctcaagctatcctcccacctcagcctcccagaaatcctgggattgcagacatgagccaccatgcccaggcccaagtcatattctaaaacatggcttactctgatattaactgccgtctacaggggaatggtctaattactctgcaaatgctctccaccttctagaatagtcacattccaattagtatatttaaagctcttagaagtcacgtaataaaaagaaatattttctttaagattttgaagccatatttacaaattatttgactctctagtctttttcttgtttttattattcaactggactcttaacatctcaaaaactagtattcaatgtaacagtttggaaaatgttcttataccttttctacttttaatagataaaattgtttttaattcatgccaacagagatgaaccaacaatctaaaagaatggactcctaatcaattgtagtgaatggaccatatgttcatattatctgtaattaaatggaggaatttaaaaggaaaggtgtgagaatggaagagaaggctgcctccccacatcctatccaaggctcctgtttctacccgcacaccctaccacagaaatacccaagatttattttctagagaaatgttctcagaaagggtcaggactctgagagagaagatgtagcaccctgcagggatgaggtgtggggctgaaacaaggaatgaagggaatgtctgtggtgcagatctggttccctgagatactccgagatagatagagattgggatgcagggtgtttgtggggaaatgttctcagtgtgagcaccacaggaagaagagtaggaacagggttaaaggctcaatggaggcctcttctggttcagttggggtttctaaaacttagaggaaggggttaggactctatactatctccttcccgtttatcaaatagccattgtctgcagactgctctgtataaatgggtataatcttgggcaagagcagtataccctctactggagaaacacatgctgaggggattctgggcagtgcatttcaacatccagaagagtcagcatcatgaatgctgaaaccttgcctcctaccccaccctctacctaaaatgaaagtaatcagattaatgataaattacttaaaaaaatagatgctggagtacaatagagtaatggcttcaatattttgaaggaatttacatttcaacatagactcctttagcaagtcaaactatgaactagtgtaaagacagaataaagccatctttagtgatgcaagatccaaaaaatgtaaaatattaatactattcacttcatttgccacttgagcttctataaaatgtgacccacaaaaagcaggaagctatcaaaaaggaaatcatgagatccaataatcaacacgggaaataacagaaagaatgcttaggatgtcagatttctagcgggcctagaaagcaactagctgagaagtacagattgaagcaagagtacaaggtgttgaggaggaggctgaaaagagaaaatgaaattgatagattatccaatttgctagagcatctgagaggggtggcagatatgagtaccatttggaaaagaaccaaagcaattattaactactagcaaaacagaagttgagccgtaaagcaaatatgtatatattacatacatagtaaataagatttatatatagtaaaaatatgtaaacagtgattgttaatttaactaaaaattgtgatgtaactaggtgaaaaaagggaactggagatcagtataagataattaaatgtttattatgataagaaatgaatagataatggctaaaaaaatgaaaatcaagaaaaaaaaacccagtataagcatattacttagaattatagagttaattaccagcagaaacaaaatgacttgagaaagagcattcacaatgaatatatatagtatagttttgcagactgttttttgaataaggttttcagtataattttaaaattatatgtgcataatttctctatttatcctgatgggtgagttaaattgccctgacaacctctaaatcttgtaacaacaaagatgatagtgattgttgtttcccatactacatatcatcgacagggagctctgctgcacagcctcctcactctggtacagaaactgacagagttaccatcatggactttgttgatccttctggcagaaggagaaaggggaagagatggagagtctcacaccagcgaatcaacgcttggctgctgattggccagaattagtcacgtggctccattcaactacaagagggttattaagtgcatctacatgtgtcctgagggtggagagctacaaagagagagccagtatcgctaatggttgcctcaatttctctcataataattgttaagtaaaaataaaatagggcttggcgcagtggctcacgcctataatcctagcactttgggaggcccaggtgggaggattgctcgagtccaggagttcatgaccagcctgggtaacttggcaagacaccgtctcctcaaaaaataaaaaaaactaaaaaaataaaaaaatagccaggtgtggtggcatgggcctgtagtctcagctacttggaaagctgaggcaggaggattgcttgagtccaggaagttgagactgcagtgagccgtgtttgcaccactcgctcttcagtttgggtgacagagggagaccctatctcaaaacaaatacaaaaacaaaaacaaaaatggtttacttctagctaaaaatttaattaaaaattaaaaattcctatggataatcagcatgtaaatatttgtgtgataaatatgtaggtatataagcaaaatatgtatataaacaaatatacatatggattatatatgtataatttatatttttatatttggttttttcatatgtgtattattgagtccttaaacaaatgttttttgaatagcttctatttaccaggcattgttccaggttctgggtattcaatagtgaacaaaacagacacccctatttctgtgtagcttatatggagtggtagggacagagagactcagtaagcatagtaaataaatacattgtgtagcgtcttagaaggctctcagtgctagggaacaaatagtgcaatagcaggggagttcaatacagaggctgagaatatggttagaatttgcaatagggaaatcaggttagaaagggccctttgaggcaaggattgaaggggagtggggatagattcgtgggcaaatgggcagggaatgcaaatatcctgagactggagcaggcttgcgatttttccaggaatggctggaaggctagtgaggctgcagtgaggggacataagtgagatcgtgaatggggacataatagggggcatcatgtgaatatatgggatgtagagaccgtgctaaagactgccatactctcagttaattgattgaactctgagtgaaacacttgaatttacaccgggaaataaattgcccagcatctagaagatgattaatatttcatgtaaaccaacttggtcacactatgaagatggaaatgtaaaacttgttacttttctatccattattaattgcttaaagctcttccatgctttagataccgcactaagcatttatgtttcagcaaagtattggcataaaataaagcttacaggatggtgtgaaggcaatattttttgagtgtctacagcatgccacaaaatgacttcaatgcttagaataattgaattacataaatataatgtccccattttataggcgaaaatactgaggctcaacagacataaaatggcttgagttaccaggctacagtagaactaggatttcagtccaggtcagtctgaccccaaaaccttttcttttttcattgtttggatttagcacccccaaaaatgtcttgtaatgcagatttcctgggtccagggaattgtttaagtttttgttctaaaaactttcttatgaagcagattacatatggaaaatgaccctatggactatgagaattggcctttagagaatgtcactgccagccctgttggtatctataagaaccaataagcattatttacagagagtgatatacacagtgataattaagaaataactatatttatgatgacaattttgccaaatttactagaaaaaaataaaatatcctctgatttgagatttattgttcttttcttttgcaggtaagtttggaaattttttttgcttgtggaatagaggtatggtatcacttttttctgaattttattttaattgcttttaacattgagcacctttcataagtaatatgtttcaccacccattcggttgttgttgttgtatatatttggaaagtaacattgtgggtttgcgttatttgattcagaaattttacatatgtgattccatatggtaaatctatgcagtgtttgtatttgggtttgtgtttaaattatttctgtgtcaagtataaggaagaggattgtagtgcggggtctgtgtcagggaaatgggggactgtaaagaacagaggaaagaatatgcatgtaatgagaggttgaaaggctgagaagggcagctccaggcatgtaatctacaatggccatgaatgcatgtcatgaggaaaagatgccttttcaggaacaaaataatcaactgaaaactgttttcattcacttttctaagcccctagttttttgttttctcctattattgtgcaaaatttctggccagactattgctgacatgtacctttgaataaaaaaaatggctgtaactattctgaaacatgttaagttagaaagcaataaaatagatccacttcctggaaaaaagctcttattaactatatgtcaactatttcagataaggagtaggaagtttcagtaaagcttctagatacacaaaagagaggataaaatattagagggacttagaaagacrtgatatttgcactgaggaaagaaggtagcctgtaagttgaccacataggaccacggctttattattgtgcaccgtgctttcattagtatataaaagaggtgattgtgtgagatttaaatcaagcatgaacttaaactaaattccatattaattataaacggtatgtttactttattcaaaaaaagatatatgtttctcaaaataattgcaaatattattattaattatrtaaaaataaagaggaatgaggatactaatctactcacctaagttctagctaagagatgaggtagcaaaggaggaagaagttcttcagttcctggtcttgatgggtaaagcgatttgatctcattatattctctccaatataatcatattaatatcgaagtcatcagaacggagttgatattatcaagctaagtaaatattagaaaaataaaaattaacaaatggtttcactaaaactgcaaagtttgtacctgraccacaaagctaatggactggcctacaatggtctttgttttaactagtattccgggggttgatggaaagggagtggaattaaagggcattgtaaaatgtcatggcatccaatctaattatcagagctctagctccagggtcagcaaactttttctgtgacaagccagatagtaaatattttagccttttggggccacaagaactctgtagtaactactcaactctgctgttgcagagcaaatgcagttatctgtagacaatctgtaatgaatgagcataatatgttccaataaactttatttacaaaatgaaaaaaagtagtgggcaggatttgctctgtggtagttttccaacccctacctagctccctttgaaataaaaaaaaaaattaagtaaactttagagattttggaacaagatgtatgttggcccccttcagatacagataaacacttggtctaagaatgaaatgttgttcaactggagttcagaaacaagatatgaacttctcaaaagctttgatgaatttaaacactagagggcacaaaaggacatttttaagtcaaggacctcttgtaaacagaacactacaattatgagaaactgcctgaagtagagcgatgtgacctcaatgtgcataatttgtttgaaatgtcagcctgtagctcttgtgacctcactgaccacaaaaacttgaagtggttgaccaccttcatgttgctgtaataatagccacatgtctttcttctttttttcctacttctttctcacttctttctctctctyttttttttttttttttgattgcttttggccctttcataaaatatggccaaaattgaggatttatatgatgggattttttttcatttcctaatagtttttttaattgctttagattctaattttcatgtggtgagtcctatttgtagtaaataagttattttgaattatgttgtgtcaatcttttataaaatcataataaaataatgcatgttatttatgcatatgatttatgcatataataatgtatattgacagatgtcatctgttacattgatttatgaactaatttgaaagttttatttcagaaaaatgcttaaaaatcagcagaagcttgaagcctcaaaattactcctaccctttaacacatggacacaaagatggtaacagtagacactgaggattccaaaagccaggaggggaaaggggaataagggaggaaactctacctactgggtacaatgctcactacctgggtgatgggatcagcactgccccaaacctcagcatcacgcaatatactcatgtaacaaacctgtacatgtagcccctaaatctaaaataaacattgatatttttaaaatcctacctcttaatttagtaattctgcttgtagatatttggattgtggaagtaatttgggatattaaaatatttatattcaaagatattcaccrtaaaaatacctataatattgagaacctaggtatattstatgtatttcacatgaactaatgtttaaataaattttcatattagacccagccaatagaatcttgtcaaccattaaatatattttcaaatgacattaagtgatagagaaaatggcttatagtaaaccatgaatgcaaagcagaatccaaaaattatgtacatcraatctcaattgaatgttaaaattagatgcgtaaatatatgtatatacatataaaaataaagaaaatgagccagatttacaagttgcctctcggtatagatgatttttaaaaaaatttaattttctgaattttccaaatttctatcatgaatattcatcattcatatggtcataaaaaataagtattattcaaacagaaaactatttttgcattctgacagcacttttttaggtgtgattcttagatcagtggtgctaaaagtcagaaggttataaggaaattatttatgtatcaggcaatcaatttaaatgaattattgattgttacgcagacacatcattagagtcacttttttagccctgggatgggatgatttgtctcaggtttgggtgttgtggcttagttgccgtgcactaggcagtgaagaccaggaaggaacaagggcctgctggagaggcctgcagtgctgatattgaacatggacttccctgtaagctccctggactgtggtaaagcaggacacatcacacacacacacacacacacacaaacacacacacgtggacacacacactcatgctcctctatcctttttctcttctaaatctgctttctgcccttgcctttccctrtaaatggatgtgtgtggagaggagctggagagacagcaggggtctgaaggatgctaacttggactttttcctgagcaaagaattccttaagaatgacctggtataaaaattttgaagaaatctcataaataatatgggcaaaaatgtgacagcaatgtggcacaatgcaaaagcttgtcactagtttcagcccagcttttcctcgtgattgttttgagtagcatgaattatcctctaaaatgttggtttttattcctttttcattttgtacaaacatacctaaaagggtgaacatagtataagcaaagacacaacgttggaactataaggaataattttttcttaattcactatgtatttttctaacacttttcttggagcttttaatccttagaacctaggagatggaggactatacactcgggtttacttttctttcattttcttcttctgaattcttttttttaacttttaagttcaggggtacatgtgcaggtttgttatataggtaaacttgggtcacaggggcttcttgtacacattattttgtcacccaagtattaagcctactacctattagttttcctgatcctctccctcctcccaccttctaccctctggtaggccctagtgtgtgttgttcccctctttgtgtccatgtgttcacatcaattagctcccactaataagtgagaacatatggtatttggttttctgttcttgcattagtttgctaaagataatggcctccagctgtatccatgttcctgcaaaggacatgatctcattcttttttatggctgcagagtattccatggtgtgtatgcaccacatttttttttatccagtctatcattgatgggygtttaggttaattctatgtctttgctattgtgaatagtgctgcaatgatcatacacatgcctgtgtcattataatagaataatttctattcctttgggtatacacccagtaatgggattgctgggtcaaatggtatttcttttttaggtctttgaggaattgccacactgtcttctacaattgttgaactaatttacactcccaccaacagtgtataagttgactttttaatactagccattctgactggtgtgagatggtatttcattgtggttttgatttgcatttctctaatgatgagtgatgttgaagactttttcatatgattgttggctgcatgtatgtcttttgaaaagtgcctgttcatgtcctttgcccactttttaatggggttgttttttcttgtaaatttgtttaagttccttatagatgctagatattagacctttgttgaatagtttgcaaaaattttctcccattttataggctcactctgttgacagcttcctttcctgtgcaagagctctttagtttaattagatctcatttgtcaatttttgcctttgttgcaattggttttggtgtctttgtcatgacatattttttttttttttttgagatgggtgtctcactctgtcacccaggctggagtgcagtggcatgatctcagctcactgcaacctcctcctcctgggttcacgccgttctcctacctcagtctcctgagtagctgggactacaggcgcccgccaccacgcccagctgattttttgtatttttagtagagacagggtttcactgtgttagccatgatggtctcgatctcctgacctcgtgatctgcctgcctcagcctcccaaagtgctgggattacaggtgtgagccaccacacctggcctgtcaggacatcttcacctgttcctgtgtccaagatggtattgcctaggttgtcttctgggrtttttatagctttgggttttacatttaactatttaatacatcttgagttaagttttgtatatggtataaagaaggggtccaatcttctgcatatagttagccagctatctcagcatcatttattgaatagggaatcttttctccaatgcttgtttttgttaggtttgtcacagatcagatagttgtaggtatatggtcttattcctaggttctctatcctgttccatttgtctatgtgtctgtttttgtaccagtaccatgccgttttggttactgtggccctgtagtatagtttgaagttgggtggcatgatgcctctagctttgttctttttgctgaggattgccttagctattcgggctcttttttggttccatatgaattttaaaatagttttttctagttctgtgaagaatctcartggtaatttattaaaaatagcactgaatctataaattgcttcaggcagtatggccattttaacaatatggattctttctgtccatgatcatggaatgtttttctatttttttgtgtcgtctctcatttgtttgagcagtgttatgtagttctccttgtagagatttttcacctccctggttatctgtattcctaggtattttattctttttgtggtgattgtgaatgggattgcattcctgatttggctctcagcttgactattgttggtgtgtaggaatgctagttatttttgcacattaatttcatatcctgaaactttgctgaagttgtttatcagtttaagaagcttttgggctgagattatgtggttttctagatataggatcgtgtaatctgcaaactgggatagtttgacttcctctcttcctgtttgaatgtgctttatttctttctcttatctaactgccctagccaggacttccaaaatgttgaataggaaaggcgagagagggcatccttgtcttgtgcccattttcaatggtaatacttccagcttctgcccattcagtatgatgttgactgtgggtatatcattgatggctcttattttttgagggctgttccttcaatacctagtttattgagagtttttaacatgaagcgatcttgaattttatcaaaggcattttccacatcttttgagataatcatgtgttttttgtctttagttctgtttatgtgatgaatcacatttattgatttgcatatgttgaaccaaccttgcatctcaaggatgaagcctacttgattgtggtggataagctttttgatgtgatactggatttggtttgccagtattttatggaggattcttgcatcaatgttcatcaagaatattggtctgagttttaaatttttgtyatatttctaccaggtatttgtctcaggaagatgctggccttgtagaatgagttagggaggagtccatccttctcagttttggggaatagtttcagcaggaatggtaccatcycttctttgtacatctggtagaattcagctgtgaatcagtctggtcctggggtttttttggttggtaggctatttattactgactcaatttcagtgctttttattagtccattcagggattcagcttcttcctgattcagtcttgggagagtatgtatgtccaggaatttatccatttcttctagtttttctagtttatgtgcataaaggtgttcataatactctctgatggttgtttgtatttctgtggggtcagtggtaatatcccccttatcatttctgattgtgtttatttgaatcttctctcttttcttctttattaatctagctggtggtctatgtagtttattaattttttcaaaaaaagaacaactcctggattcactgatcttttgaatggttttctgtgtctcaatattcttcagttcagctctgattttggttatttcttgtcatctgctggctttggaatttatttgctcttggttctctagttcttttagttgtgatgttaggctgttgacttgagatctttctaactttttgatttgggcatttcatgctataaatgtctgtcctaacactgccttagctattttccagaggttctggtatgttgtatctttgttctcatttgtttcaaaaaccttattgatttctgcttttatttcattatttacccaaaaggcattcaggatttcaggagaaaaggcattcaatttccatgtaattgcatggttttgagtgaatttcttagccttagcttctaatttgattgcactctggtctgagagattgttcattattatttcagttcttttgcatttgctgagtagtgttttacttctgattatgtgatcaattttagagtatgtggcatgtggcaatgagaagaatgtatattctgttgttttkgggtggagacttctgtagatatctatcagatccatttgttccagtgctaagttcaagtcctgaatatcttaatttcctgtcttgatgatatatctaatattttcagtgatatgttaaagtctcctgctattattgtgtgggagtctaggtctctttggaggtctctaagaacttgctttatgaatctgagtgtttctctctgttgggtgtgtatatatttaggataattagatcttcttgttgaattgaaccctttaccatgatgtaatgcccttctttgtcttttttatctttgttggtttaaagtcttttttgtcagaaactaggattgcaacccctgcttttttctgtttttcatttgcttggtagattttcctccatccctttattttgagcctatgtgtatcattgcatgtgagatgggtctcttgaagacagcataccagtgagtctcgattctttatccagcttgccactctgtgtcttttaattgaggcatttagtccatttacatttaaggttaatattgttatgtgtgaatttgattctgtcatcatgatgttagctggttattttgcagacttgtttatatggttgttttatagagtcattggtctgtacacttcagtgtgtttttgtagtgtctggtaatggtctttcctttctatatttagtgtttctttcaggagttcttgtaaggcatgtctggtggtaacaaattccctcagtatttgcttgtctgaacaggatattatttccccttcacttatgatgcttagtttggccagatatgaaattgttggttggaatttctttttaagaattgtgaatattggccctcaatcttttctggcttgtagagtttctgctgagaggtccacagttagtctgatgggcttccttttgtaggtgaccttacctttctagctgcctttaacatgttttctttgatttcaaccttggagaatctaatgattgtgtgtcttggggatgaccttcttgtgaagtaccttaccaggagtttctgcatttcctgaatttaaatgttggcctctctaactaggttagggaagttctcatggataacactctgaaatatgttttccaagttggcttcattctcctcatgtatttcagggacaccaatgagtcgtagattcagtctctttacataatctcatatttctcggttttgttcattccttttcattctgttttctctattcttgtctgactgtcttattttagaaagccagttttcaagctctgagatttctgagattttttcctccacttaggctgttctgttattagtacttgtaattacattatgaaattctaataatgttttcagttctatcaggttggtgacattcttgtctatactggctgtttgtctgtcagttcctgcattgttttatcatgatttttagcttccttccrttgggtttcaacatactcctgtacttcaatgatcttcattccaatccatattttgaattctatttctgtcatttcagccatctcagcctggtttagaagcttgctttagaagggacrcggttgtttggaggaaaaaaggcactctggccttttgagttttcagggttcttgtgctgattctttctcatctttgtggacttttctacctttaatgtttgaggttgctgacatttgaatgttttttttttccttttatcctatttgatgaccttgagggtttgattgtggtattaggtggattcagctgattggcttcatttctggaagattttaggggtccaacactcagctcccaacttctggactgtgtgcactaactctgggggacttgtatgaggcccaaactttgtcttctcaytcttcaagttttggaatccactcagctaggggtgctgagatgggacagctgcagtgaagtgctagtgggtgtgggggtgcctgcctccttgcagatgttcaccagagtggcagaggcaatgcagcttacagaggtgggcaggaggcccttgctggagcctgtgtgcacagtcacactggaggtggtgttggctgggggtagggtggtggcaggcacaggtctgaatgccttctctgtgccccacaagcaggagtgatagctcagggtaggggaggattcactgttctctgtacagcccacgtgtttacttttcaaataatttgatgaactgagtgaaaatattgaatttagactagctgatttcattaaactatgcttaaaacttcaatttatacaatttttttcttcattttaaaactttgaaccaaattggcttgtaacataaactaatagattcaattagttatttggaattattttcaaagatgtgtccaacattctagagtttaaagtttatatcctcaaattacaattgcytgtaaagtttactggtttatttcctcaaatgatcattgctggtttatgtatatgaaatattctcaaacatatcaaggtacagataaagctatgagacacgtaagcttcttctgttgtccattgggtaggtagagaaatggatgacttggcttatttaagctaattactaaaggaaatagagaagccttgagtcctttctggaacaaaacagaattaaatattcattacatgagggaaagcataatttagaacaaaataatgaaatttccctggagtctgtcttctaagaggtttgatggattcatttaacatacatttatttcactcctactgtgctgggcagtcccagggttatacagccccaggaggttcagagtccagtagaacatgagcatataccactctttttctttacaatactcctttagagaaaagaagactgcagtttgcattttgccctgggtaagaaacaaattagagatgtaaagaaactttgctaagcactacagatgcctttgacgtgtttattcccgttgactcataactgtgtctcaccagataacctatagtatattcataccsaaacttatctttttctaatactttagttattagtttttaggtaacctgaagaagaatgaatatgagcttttcatatctatagtaggttcacttccaatccagagaaaccatggacagacctttttttcagctaaacaaagtgtggtagtttaacatcgcagtaagatcaaaaaccaccttaactgagtatgaaaaatatttgatgatacagtagtcttcaaactaagtttaaaagatgcaaatagtacatatatgccagtacatatgccagtgtcttgaatactgggaaaaaggaggattcgagtgggggaaagttcacgacattgtctctctgcctctaatctttcctgctcaagtccttgcaagtagaatcaaaatatcaattgttctgaaattaattctgcttttattatttcactcccttgttcagaraaacttggtaagttttcacttctaaatggaacaaaggtcccactcctaacgtatcattcaagttccttcacagtccagtctcaacctttctttcctttcttttcctaactatcattgttcataatacagtaatataccctcccaggagtattcaatcttttggcttccctgggccacattggaagaattgtcttgggccccatataaaatacaccaatatgatagctgatgagcaaaaacaaaacaaaaagtctcatgatgttttaagatagtttatgaatttgtgttgggccacattcaaagccatcctgggccatgtagcccacaagccacgggttggacaagcttacaggtctaaactctgataatttcactacaccttggatattcatacttctggtgagcmgaggctgcttacactttttataggccaatatcaatcataacgtttaagtgtttaataagtatcaatatttatctcatatggctctcagaacagtgaattaattcacttagcaaatatatattgaaccattaccactatctggccctattctagttgttggccaaacagcagtgaatcaacatgtctctcctctgaaagaatttaattttttgtggggaggatagtacaaaatatatgaaatacataaacacattcaaaatgtgtgtcgtgatggttagttctatgaaaaaaattagtgcagagtaaagaaatagtaatacgagtgtgattttagattaaaaagtcagaataggtatccctgtctgttaaactgacatttaaatcttaacaaaatgagtgaattatgcatttttccaaaggaagagtgtttcaagaaaaagaaatagcaagtgcaaagctccttaggaggaggcacattgtgtttaaggaacaggaagaagttgagtattgtgggaactgagtaagcaagaaagagaatagaaaaggaggccataaagagaggagagggcttttgaaaaccatggaaaagagtttggattttatcccaaatggagagggaaactagtaaagggttttgagcagagaaatggcatacattttcaaaggatcactctgggtgctctgtgaagaatagagtaggagcaagagtagaagcagggaaaatggttatgacgccactgcaatagccttggaaggagacagtagtgacttggaccygggtgatggcagtggagatggcgagaagtgatcagattctggcaatgttttgaaaccagagctaattgtgtttgatgacggatttttacatagagtgagagaaaaagagatgagtcaaagataattcaagggtttttggcctgaacaaattggaaatgtgtgtttttatttattgagcttgaggagttcaagggaggagtaggtttagtggtggggtggttctgtttgagcattttgagtttgatagtcctgtttgtggaaaatgcttggagtgctgccccatttccctccacccactatagagttcacctgaggctatggcagactcagtcagtttcccatctcaggcacctgggggctttctgcagtacaaaggagcctgctgagaccgtttacagaattttttaacattcccagtggcaacactccaacattgagggtccagagttggtgctcatataccccaggttccacattctccagtgggacagtcctgaggcatgtgtatatatggtcccacaaaaggtccctggggagattgggccccatctgcccctgcttattaatacacactgtattaacttttcttcctttgctatcccacttctccatcacctaactttgatttcctagaatcgccttcctgcctcttctccaaataaactacgcactccaatattttgcagtctccctggaaggaattaaacctaagactattaaatacccatatgtcaatctccaagaaggagattgatatactattctgaaaaccaggcaaaatgtcagggatggagatacagttgggaggcgttagtctttttcacaagcctattcaaaagcccattgcacaagcactagatatgtgtagattcctacacagacttgttaccgtccttgtctgcctcatgtcatctcttccacatgaatacaatgatactcatcaatgaatgctctgaactttcagcaaaggccacagtagaatttctagatagtagtagattgagaagtgatgacaatttgattggaagctaagggatcttggggacttgtcttgaatttgcatttacatagaaagcacatcgtttttatgtttgayacatatttatttgtggtgggtttggaaaaccttgtagcggttatggaggggcaccccaacccatcctttggtgttgccattgctttttaattatgatttgtgctaagccacacattctcattttacctagctcagggttctaagcatgtttttcatgatggtttggttaggaaagtgagtagcaatgaatgagctcctcaataaatacatagcacagacactgacaggcaaagtgaagtttgtaatcacttcccaatcaattgttcaactgaatgtgagaagaaatcattttctctcctgttttgagtcagaatatcacataaagcacaactcttcctgcatacattgtatcatattccacagtaatttacttttttgcaagaagtatccaaaatttggtttttcctgctgagcagttatccagataattgcaaatcagtggaatcatttacatgaataaagatttttattctaattaacgtgctaaatcaagcacaccaaatgtctctaattcttatattactcaaatggcaatatttttgtcagtgactatcatatgaaatttcaggtgcctaatgcattttcaaatggcactcataagcatactaacgttttataaataaatgtctccatatttttaagatgaatggacaatttttgatttttaatrtagtccccaattttcaatttttcaattttcatttaccgaatggagaaacagcattcatcagagcaaaagagcaagtttcacaagtcatgggaacaaacatagatgctaatttcctattttaggaagttctttttaaagtattatcattaagaagcacaactctgtggaatatttatgtgcacatttaataatagagaattcggatgtcaagtctgtgtgttactcatacccatacatgcatcctcaaaaagccttggaagttaatcctcagctgatgaaagctaagcaattgctctggaaggatacttgaagtttttggctcttggggtgaaggtacagtcacgaaaacctctcttcacaagagggcgctgtgcaaacagctagctcctcgtgaaggaaaattgccttgcagactggcacgaagtggatttctttacatctattaagtgctctgctcttcataaaggaaaatttccttgcaaactggcacgaagtggatttctttacatctactaagagctctgcttctttctctctctcttgctttttccttgccatgcctcttcttaggctctgtaaggcagacttcttgtcttctctagttatgcttctgcaaactgcatcatgctgattctattaatgatttgattttaaataataccatcataggtgttaaatgatgtgtatgcctatctggcttctcaggacttctctctcactactttacatctcaccaatgtgtaaaatatctatgagacatctttaatttaatatgattcaaaagtctttactcttgacctttgtttgaagtctaatcaactaaaaacctaaaattcctggtgggaaaaaaagaaacttgactactctagttttttaataacatgtatttcatttattctgattataaaagtcatctttatttattgtagaaaatataaacattatggaaaataaaatttaaaaacatctatcattctattacccagaaataacttgatcaacattttggtgcatattttaatgaatagatttttaaatgagaaatgcttttcaggagtaattagattctacttagtattgacaattttataatatgcttttaaacaaagtattaacattaacttttttggaaaatgccactttctgctacttatagctgtattggctattttctcagaacttctgctgtaatgagtttatactagagttgcaaatacacgttctttgaatgtacttgaggagtcgatagtctgaatctgagattttccacagctcttggagcacctgagaacacactagcttcttccacgattctgcagtacttgctccttcctgataggatgcctttgtaagcgtacaactccaaacatgggctgagtgttcagtaatcatttgtgttgagttcttcagtttcatggagactaaaattaggttttctctgtcactcttgtaatgtcatctgaccttgacctgcatttcaaattgctgagaagttagcaagctgacttttacactaggcacatcagaaataattgattaaaaatagagttattgaagttgaatttttttcatttatagaaaagtacaatgtcttgttcatgacaaacaaggcctaacatttatataatgttcatttaaaatatatcaaaagaaaacaaaataataaaacccacagaaaacccaaaaacaactcacctattaaaacatctcttgatttataaatattatagtttagtttgtacaatatcagtaactgtggaaagctcccaattatctcattcccaagtgcttgactgactcataacttaccaacaattttcttatttcagagaatcccaaaaacatattacctaggactaacctggaataaaacttcatggttgatagcttttatcaattaaatgggtattgatttkgataactcataatcttgagcatatctttagatttactttttatcctgaatttatttttgttagtaagatttagaaattcagatttattttgtgctttatatgacatagaaaaaaacaaattgtctttcctgtacaaagtccacccttcaaaatagactccagaagaaaacatagagacttataacttaggttaaacataggcacaatcctaaatagtattcagatgagtcttacctgaataattgctcacctaatatgataatcacctgttaagaagcagtttcttaaatgtcactgttggaatctaaacagtagatacacaggtgttcactgtaaacttgtttcaatttttctgtatttttgaaaatgttcataataccatcttggggggaaaaagcctctttttgacatggcaagaaccatattctactgaaacagatcttatatgctctatcaagtttatattttagacatccctaattcagctcattctggactattccaggactgattgccctactaaggcatgcttatttttttctttatgtgtataagaaggattcaaagggaccgtttgtcagttttaatgtgtgagcactactgatatgttttattgagaaaaagcttactgccacagatcacagagatatttttccgaggtaagattcttgctggtttgcaagttttgtaaggaggcaccaggacccatctctgtacccccagccacggagcccttatttagacccacactgggctgaaatagaaacttctgtacaaatgtatctctcctgtgctctttccactttaacagaatagaaagaattgactggttgagcccaaatatttcccccaggccagwgttacaaactggcgtttcaccaaaaataactcatttgatatgtttttaatgttgatgatctgaaaaatcatcttcttgtttttgtttgtttgtttgtttttagagatagggtcttactctgtcagccaggctggagtgctggagttcagtggcacactcacaactcactgcagcctcgattcccaggttcaggtgattctcccacctcggcctcccaagtagctaggaccccaggcatgcaccaccatgcctggctaacttttctcttttttgtagagatgggatctagccatgtttcccaggctggtctccaactcctgggctcaagagatctgtccgccttggcctcccaaagtgctgggattacaggcatgagcttcatacctggctaccttcttcttaattatatacattttttcttaaataagagctcatgttattttttatttctataaatattttatattccttctcttcttattgccctgatactttaaataaacctaagcccagtcaaattttgtattacccttgagtttcagtttttggttcattcagccctaagttctctttgggcatgaattgttttcaccattgactactagcaggcagctggcatagcctgggacatgtgaggtgatgctaaacatgcatttgtgagtagaaggaaggaagaaaggagggaaggaaggaaggaaggtaggtaggaaggaaggaaggaaggtaggtgggtgggcaagagagagggaggaagaaaaaaaggaagggaggctggttggtttgattagctgttgaacaaaattccatatagaaagtagcttactagtctatatcttttagctctgtttatttcaaagctttgtgtgtttttgttagggtcacttatagaatatttagaaaaatacttgctgcctcatgcatttcaccatccagtgcctggtgagacctaaaagcccatagttataattttgtttctttgaccaaagtttgttttattttcaaatataaattcaatcccttaagactcacctatagcatatatatcaaacaaaaacacgtcaaatttaactcagaattttgctggataaatgattttactggatatcatctgaccaatgaaataacaattgtgtgttctcaaatttacttctacatttttaaggtagtaagtttaattaaaaatctctaatataaaaatggcttattctctaaaatttagaggtaagctaaagttttcatcaaggccccattatttagcactttccaaacttgggaaggtcacttaactccactgaaccagtagaaataaaattagtggtaacactgaaagcaaaaaccagaaccagtccaattgtcttattaataatagcctaattgtgtaaatgtctgttataaatttcttagctggttctgagagatagctagtaaatggcaccctaagttttatatattctgttacaaaacaaaaacaaataacaacaataagctgttttcttttgctgttactcaaacatctggatttctattgtagcccctagcacattgttacctttggttggatggactgaaaagtgttgtgatttttctcctatgtagaatattcagagggaaagtgcagggcagtgcacaatgcatacaaacattgacaggatcacttttcctcaagctgaactatactctaggcctcctctctctctagttaccacagttgaacccactcagcccctacttgcagcctcagtcccaccccaggctcacaggccaattttgtcctggaattaggaattgaaagatctcaggtaagccagccacaatggagacaagatttagagataagcaaaactgacttggactcacatgtctgtcatatattacctctgtggtgttagccaagttccttaacctctatgagtctcagatttctcatctataaagtggtgataataatgtctgctcgtgagttggaagattaagtaacatgtagatcttatacctgacaccaattgtttttcctgtgaaagttcaaaacttctcttatgatttaattcttcaaggaaggtgacctgacctttttcattcctgtatttacttatattccaggcatgtattggttaagatatacattttgcaattaagagggacctcaattttaacctcagatctgctactcattggctgtatgatcataggggcaagttacttcaacttcgtaagtcttcgtttcctcagtggtgatacagaataaaaataacacaaagcacacagataaattattatgaggataatatatagtataccctaaaattctgtgcagagtcttcagaacactttcatgttagttaccctattcagtcctctcaaaagctctttgcaatggctctctctcaaatgagaaccaaatggataagacattataactcagcaaggtcaataaacaccacagaataaacaccaaataagtggttgatatcatcatagtaaaatgaggaattagaaaagttaacccgacattatggtgatgtttggttcacaaactcattcagtgcacaggaagtgtccaagtaaggaaggggtctgaggatgacaggtactcaggaatgggaaagtttatgactgttggctccaacaaatggataaccagatttagcaagatattgaacagtcacggaaaaaatccacagcaccaaaatttagcacatgagatttttatttagggattcttggtattgggggtcttttttctttctcccaagggagtgattttgtttctcagcctagcaatttcatcactgcttttgcttatttgtaagcataattctaaaaagttgtaagaagccatttctgtccttatttggtacgtggccaacaataagggtagcatgagttggagtcagtgttgcaactggtttcccaattaaacaacctgtctctaggatcccataagttttcaaaaaataagtagaaacatttctatatttaggagaagcttagggttttgagcaatcgagaaattctatcacctaatttttgtaaaatttcttgccacctaattttttttagatcttgtaaacaaagttcttagagggttttaatgctgcaaataaaacattaacatttcttcatatgattaaccttcaagatataacagctaatattttattcttacacacatgggatataaagatttcaaatagagaaaagtgttatctatcaaaactgaggactgatattctttttgaaactgataaartggtatgcctatttaccatgctcatgaagtaaccaattggcaatttttagaacttaaagatgtttctaacagtataaaaatagttttcctacctctcccaaaagcttacaaacatcagtagtgtgtgcctaaaattttgtccagttttcagaatgtttttatataaattgccttattcagccctctccaaaactctttgcaatggctctcaaatgagaaccaaatgggtaagacactgaaactcagcaaggtcaggcaacaatcttcaaggtcacatggcaagttcatggcataactgtgactctaatctctaatcccctatacagtgctgccctgaaaacttgcccaatggtattttgattaaaaaaattaattaatcaatcaaataggaaaaagaaactaaataagccctacctaaattacctgttctgaaatttctgcccctatttaggcacatataagaatataatgtaaatgctccatcttatttttaagatgccctgaaaatattggtttgtccatttattaaacaaacataattgtggtttttatgtctctagactgtttgctaagcactgagtacccagagggaaagcagatgttatccatgttctcatagtgtttaggtctatcaggggagccagataccaaataagtcattactaatgtgatgacattgacaaagaggaagtacaaagtgcagtggagacctcacctggtatggggaggcagggaagacttccggaggaagtgaatttcaagatgtaatcctatatccaccactccttcactcaccagtcaatagctaagtaggatttttatttaagactgtattcatgagtagaatattaaatagaaagaatttttatgacttttaaaatcttcatatacagagaattgaacaagacaatcagtgacaccagaagacttttacacacttgttagaaaattgtgtcaaattatttatttcaaatgattagtctacattgatttcaagatttttaaagaatttgagtctagaaatattttttgaatagttagaaaaatctcttaggaacttgtcagtcatttagtagatattcaataaacataaaatttattttcttttccttccatttcttcctccatgatttctttccttcaatcccatttatccaagtaggctttatccaacaaagctttagaaggagctttgttagtttagtgaatagaaaagcttgacttagttgttttccaaattgctaaaaaaaatcctaaaattaatgtagatggaaaccttaagtgtctagtaaaacattttgattcacaatcatagtcatattgattttttatcattatatttaagcatgcctcttattgattgttttagtctatatcctgattttagctctttaattacagtttgtgtctgtttgtgtcctgggtcatatatgagtaatggatgcaattgtagaagcttaaaacacagagcatgctttcccagtgttcttaagaccatggggtaccttcaattctgttaatgttttactgttgccaagtcttaaaataattgtctcccatttcagaacatggaataattgacctttcratcaagtagactcatataaggtttagaatgaatatttgaaagcaattcaaagaaaattttggtattattttgcaacacttccattttgagaaataacttatagttgattttgataagtaatgtaataaaaatcattttttacatttacttgtactgaatggatattagttttaaggagtacacaagccccgttatcaaactgccttttgtcacactcttttgcaatgyatcattctgaagatagaattacaacgacaccctcatcagaagtagatggtaaataacagtctgttatttgcttccrcattaacttctgctggctttgagtctgtaaccagagactatttcaaaatacagcactatcctgaaacccactatctgcctgctctggtttcctgaagcaatgtctttcaacctaacgcaaccccactgatgtaactgcttatttctctgaagttcagctcaaccctcgtctcttccgtatgcctgttaactagagacttgatgcgcaagtaattgaatgcctatgtggattacgtttaacttatcccactctcaaatttgggagtttcatttttattcatagtagctatctcctataaaggaaattctgagtttctgtgtcagacaccgaaacccaaatttgccatttgtaacatctggaatcttggaaccaaaatcccagaaatattcaagaggcaaaaamgatgccttatttagagctctgcagaacataagagctaagttattggcaggagacgggcactttgctgatactttagtggggttaggacttacatggataacaattggattggagcaatgtttagatttccgaatctggttttccctaggacatataaaattagtgtgcacaacttgtaaacataataatttgtctcagggatggaacatctctccttgctattgaatcatgcttttactaaaattcatctggaaaaataaacgcttaataaatgacagtaattagaatgttcaaaagatgtcttctttgttcttttatactctttgatacccatgaagtaaaaattataaacagcttgttgtattataaatgctagtaaagattcatcctagaaaatcattttatttaatttcttattttttccaaatgtctaaattctcatgtctgtgaaatattagccagttcttcaaaaacaatattgatatttctatttgaaatcaaggcttaattttgctcatgattaatctcagaaataagtagcttatttctatgaccttactgagacctggtaacctaagaaggattatgtgtaactgtgtggaagaaatgaaaaggaggcggtaagtaattatttaagaaaaaataatattaatattgacagacacttcttgtgtctgtaactgatttcacactaggaaaatgaagcagagtttcaattttcttgttcataatttcacatttacagttccattgttttatcttgcttaactgttctagatgactgcctttacaaagcagggggaaaagaaggaagaaatgtttttgacagtaatgaaaaagacaagattagttctccttccttgcacatttttagaaaaagttggacattccctagcagattcattctagattattcgtatgtccttgtagcttatcaattagatatccattaaatttgaatatccctttaaaaaggtaaatttgtaagcaaaggcagttaattatttgtgaaaatgtatactgctggctttagcctgaatacaaagatagggtttatcttgctatcagtaaaattgggataacaatgaaaatatttttctgcttccaaagtcgtatacataaactgtagcttttattagaaatcagtgatgctgtttcacctacaaaaatttaaacaccactggacaaaatgagagctttgtgttgcctggagggtgaaaaaagtccatctttgccagcaacatcccttctactcttctgcttgtctttgtggcctccctccccctccctttcacaccaagccacctcaccccaccagctgttagggactcctcccctctttacgcagatcaccagttatcttacactgtctggctttagtctcagatgaagacattctaataagcaccaagttgttcagctcagtgctaactctgccaggaatgtgtgcatttcctaagagctgccgaaaatggaaattaaatagtttgaaagaattaaatgataatggtggcatttcatacaccagaagggcagattggcatcagtgtaagcaccttttcagtccttctttgagaacaccaggaaagtggctacctgttttgctcatgcgaaatttggatctctatacaaaagcaaaaagacagtttgtgaagcgttacaatattgcaagttgattcagrgagaatgtgttgtgtttatttttgaactctctgctcctccaaggttgctgctgttcagggcagttctcactcacccactttctttgagctcatgtctgataagaaagaggtgaaactgtaaaaaccttttctattactcgtctccaaagctgatatgaaacctgtagcattcttaagaacccctggtgtcctggatgctgttgtgaaaacaagcataatgtttaatgtcttgagcttttattgaaattatatgaatattcaagactcccttggtgtacaagagacagattgagctttagaggtctcaaaatttgcagatatggtgatgttcactgagctcaactcttggtcaattttgtccagttcagagagggttaaattcactcttgggcacttgaagcctctctaatcttatcctgaagaagtggcgctctcccttggtttacagttgaggtcacccgcggggcagtgtttggatacagactgatgaaattatgctgcattgttaacattgaataccactcagtggtgaggaccgatgacggcactagggtcctttgactccttgggtacaatttcttgaaatagatgctttcccaaaatgtcctggactcataaaatatatgaaggattctatttggctttcatcatttatttaatttgaaagaaagttgttttaacagatttatcagagttaagaaatgtttctagggaatagaaaatggacaagataattgatctttgttgtcagagtcatgcattgtaattcactctctaaggtgacgcagcatctccttgagggcaaagctgccaaaagttctgaaagtgatctgcctgtttttttttctcacactgacttttagagaggcgctggtattttcaagacgagtaaatcctgtttacatcctgtggaaggttggctaagaattatatccatctctttttaagagaagttgaaataaggaaaattatagttggcagttagctgtgtgaaatttagtaatctttgtcagatgasccagtcataggcatgtattttttaaaattttttaacgaagccctgtgggtttacattttttaaagttcacactgatataaaggtttacccacttcaatcacaccttttgttgtgtgtgcatgcgtgtgtgtgtgttgtgcttttcaggagtggcatgtgactatgctgtttaatcagggctatatttaaaaacaaattttcgagggagtgtttctcacgttaattatgagataaggcctgagtgaagcaaactctgtcgcaaaggccaagtgtcatgcagcaggaagtcctggccatcccttccagccctgcctcagccagcctgccatctctctgtcagcgcataccactgcacaaaggaaatgccctcactcagctacaagtgcctcctgctccgtgcggggcctcagggccccagagccccgcaccagctctgacttctcgtggttcctggggatcttggcatcgtccttaaaaatggcttttgtttgggatcctctgggagccacggtgccaggaccatctacaagagccaaatcaagattgcgtttctcaaagtcctacaggtattactcttttccttttgtagctaggaagaattgtttaactgccttaggccccttgcaaataagcctttgccctatgttgaccttctaactcctaatgcttgttaaattgacaatatattaaataagagccaagaagatgatgtaaaccttgaaataggggtatgtaggtacgtgcagaagttgaaggaagttgactaactttaaaagctaattctgagagttaaatggcaaacttaacaaagcattcatattactgccacctgaaaaacagtgtattaacttgtctaatggcttaatacagtcaactctaaatgttagggaagggttcttgtttgaccaacaaaaaaaacactacattattcttcataagtgtttcagggcacatgcacatgaaaaaatggaaactaatgctgtttcaggtagtaattcagtgttcatcttgcccagcmgaattacatgtcatgaattcaaactaaatattttaataatcttttgtttctggaagtcatattaaaaatcttgacctcatgacttcactaaactgtcaatgactgttttacaacaaaatcagcttattttaaccaaataactggaaagaaagaaaacacttaaaaaatattggatttccttcttcatttgagtattctaggtgttaataaagagaagattgattattctttattattgtttagaaagaaaaccttttctgtttttgattgattacaatctatagcactgaaaggtatctatttaatcaatagtaaatagaagtgacattgtttgcaaaattttggatataaggtctttcttatttagaccaaatgcagcacatctggaagctgccaagcctatgtagaaatatatattaacactgaattaaaatgtgttctgatttgcctgcatataaaacattcaaagtttgaattaaaataatttataaggattaattatttgctttagacactaaagaagataatgtccttggaatttttagggaactataaaatcagagaaatcaaatttaaaaattttgtataacaatgcataagcaaactttggcaagaggtaaatataatttgccagctaaaggtataggtattaactccatttatttttatttcaaaataaaataatgatttatttgttatgtttgttacagctataaaatttagttgaaaattttaaattatatgcttcctatgtgctttgcattttgttaaatgtgattctcatgcttattgtatgctaaattgtacatttagaacttaacatcaatgatttgctaacattactgtgcatatttccaacatatggtggcttctaggctctcttcatcactagatctgataacaagctccttaatatcataaatctccagctgctgaataaagtaaaagcaatagcttgattgactaatgaatttgagaaatctcacgaaatgcagagtttaagctcttctgtgtagtttgcaaatatattataaaccttgccttctcaatttggcaaagatatttttattttgaggtgttatggtattgtaacaatttaaagctatatgataaatatattttttcaaggttcctttggtcaagttctgaccctttccaaaatataagcattagcagctaagaatgactttttcatgtayttgaatacctcacatctgtaattttaacaagtttcatttgtaacaagtttaagaggtgagaatgacatctcaaatatccatcatgagtcagtttccttcggaagcttgagaggctcagtccttcctttacttcctcttaatttgaatatacartttcccacagaataattaatttttttatatgtgctgctttcactgtttggaggttctagtttatctttccagttgcactgcaaactctttgaggttagaagtttccttacatacagcaaaaatgccagtaatgcctatttgataaagtattctgttaccctttcttatttggcatcacccgataatgttttattggcatagccaacttgatatgatcatatctatcataagttgaattgagtggaagggttagggaggtaggaaggcagttggccactggctcttgcatttctgcaggtccctcatgtatccaaaggagattacgcattcagccacgacaatgtactgacaataatgaaaaaaggtacatatcatataacttaaaatttttatcataccataatacctcaaatgcaccatgagtcactctatatatatacagacacatatacacaccacacacaggcacatgcacgcacagttaaatgctataattatcttctgaagagcatagttttattgcatagcattcttggaattaaaggtgttaaactatttgatgtaaacatgtaaaatatctcataatgtcacagccttgtttttgcatttcttattttttaaaaaatatacaaaatccttacgcggtgaaagtaacttaagcttatcttgacctttaagaggctttggatctgattccattattgaagcaactgaaagaactggacattggacaacatttcttcattgaatttctcccttataattttttttatgagcaatattttttatcttgtaaaatcttcaaatgtgcctattgtagtgtcatttttctttggctattgaatggataataatgcatgctactgggggtacacttagctttaactggaatatttttccttggcatggcttttgctgcctggtaatattcaggctaaaggaaagccaggtgtacaagatatgaaattcaattagtgtctgatttgttaaagtaatagcaaatcatatacatttaatgagtgttgactcttgagaaatacaatctgaaacagttttacaatgctcaaaatagatgtgaaagtttttcagctgtgacaattttttatcttatgtgggtaaaatacatttttataagaaaagattaatatatagcttattaagtttgattgaggcagaaagaaggattgaaagagaaaagaagagggagagggaaggaaaggcaggggagaggaggggagcagggccgtggaaggaggagtgaggaagagaaaaagagagaaagcagagggttacataataaggaaggtactttttctctgtgagcccagaagagattgccaaccatgttttcagtaatgggatcagtgttagcattagggcaccacttacaaagatgagtactaattttgagggcaaggtgctgatttatctgcctaggttctggcacacatgtttaaagattcacctaattactttagagcaacgcccctcccaagtattatagagaagaaagaggagaatgatgtgctcaagaaaacaatgtggagaagtttatattggttgtttaaacatagtacctaaaaaaaaaaaaatggggaaaaacgatctgggaagtaaagaaagaatcaaggagcaaagatttagcaagcctgtggaccctgacaactccaataagagaacactagggaattttgtgatttaaaatatattattgcttaaaactacagtagtgttcaaggaaactttaaatagaaaattactcttcttgagatgattctgtcttccaaagagaacaaatcacaaggatgttaaaaggaacattttatgtgacaagtttggggtaggtactatgtaaatagaagagaaagtcactcaaggtacatttgaatgtagggcagagattattccatagcattccacaggccagaaacagaaagtgtcttctagttttcttgccctttatagtaataggggtcatgggatagaaattctcagaaaatctccaaatctcatttttgccaattgtttcaacatcttttccttcccagcattttagcagagctgccaaacaggtgattaattaaatacatatgtgcatgcttgtacctcgtgtagaaggtctaatgagtaaatttatttgatatgacatagactgaacagtagaaggaaggattaatgacagtcagatcaacaaacaaaagtacaaatggtatctgggctatgaaaagataaagcaatatttgcccaaacaagaagatctagatatccctaaattacctcctatattattaggaagtaaagaccaaatctacaactttgatctggaaattgtatagtagctgatatgaacagggatcataggagagtgtggtctcatagctactctttgctactaccaaaacctgagtggtagcacatcagtgattgcccaaccaaactgcacaattcccattagaaaaagctgtctcaaacccacatcttagaaaggaagtgaatgccaccagtgaatcaatacactgggatgtaactttctgcataccccaagaatacctcctgttgcatagcactttttagttttcaaagcttttcagatgtaacagatgtgacagctgttgtttttagtgtgccacagctcatctcacttaattctttagggtaagtgaaaaagatgagtgtaattagtatcaaataagagaagaagaattgaaggttcagggactagagaccacacatatatgtggttagaaagtccaaagtaagaacagtagagctagtttgtattggacacttactatgcaccaggaaccattcccaatcccatacatgcattagctcatgcatgtcatcctccaaaacagcctcgggaggtggatctagcattacctttatcttacaaatgaggaaaccaggcagagcaagtttaagaaacctgcacaggtgtgaattctggaagtctgtgttagaaccaggactcctggtccctctcccacctccagcttcctcaccagatcctattatcagcacacaaggaaaaaaattccataatgagaggtattgttctaacagatgtactatcttcctctacttaactctgaatttttctctgaagacagaacaccacgtaatttgttatagaatagggcttagtaatcagttaaaatataaacttgttaaataatatctaaactgtcctctaacctaattgatgttggtttaaagaaatgctaagcaaaagcatcaaaatagaggtatttttatattaaaaagaagaaaaaggaaaatgaatccgttattttatattgtctgcttctgccccctcctggcttttgcttcatgggcttccatctggctcatttcatctggccaaaaacattggtcatgtggttgtattttactgccaaatattactccttggccagctgttcagaggagccagaagattctctgagctmgagaggtcaactccatcctgtgtcatgtctatttattctactggcatagtcttgactattaaactaggtttcttaatgatatttcaaattgtgagtaatgttggctaaattgacaaaaagaaattatagacaacatttatatctaagaataacaatactactaacaaccattgcacattgtaggaagaggtagcatggtataggaggagaactttggctctagagccaaacagacccagcttcagtgccaactctgctgctttcttgattgggcaggtttcctaacctctctgagccatttccatgtacataaatagaaaattaaaatatctacttcataaggtcgttgtgcagattagatgaaagcatgtacgtgaatgcaggactacctgccaactctttcatagcattttccaagtcttcactaacatttcacaaattttgtgaagcttcttttgtgaaatacattttcagataaactatcatcattggtaccactcttggtcacagaatagtacaatagagctggcttataaatggttaccttataagcaacttgcacatacaacccaggctcaccttggaaatgtagtgtgcaggaatgattgacagctggctagctctacagccacactgctgctgaggttcacattttcacattatcacttatagctatgagactttgggcaagttacttcatgtgcctcagtttcctcatttgtaaaatggagtattatgaggattaagtgtgttagccatgtaaagtgcctggcacatagacaacactaaaataaatgtcagctattattaataatagaatgtaagctccacatggcagcaatttttgtccttttttccacctttgtatggccagtgcctggaagagtgtgtggtacatattaggtgcttggcgtttgtgtattgaatgaatgaacctattagcaaatgtgttccgattcatggcaagtgtgaggatactctgcttccttttgccacattcatgggaagagggggttagagctgaaggaacctgatggttcatttgttcaaactcatttgtcttacattgaagagcttgaagaccttgaaaggccccagggtcatgcaacttgatagcggcctggtcagagctagaaccctggctctgtgtgcttctgtgaaaatctttgttccaatgtcccacccctcacttcaatacatatgccatctaattcartgctttcagtaaggcagcaaaatgaatgaatgattcagagcacacttcttgcagacaggagagtgtataagagccataattgggcaatgaccatggaaggacaggtttctgaataagagaaagacttatccaagtaaaattatgttcagacattttacttacaagtctaaaaatcacttgctacaacagctacaatagggtttttgtaaggaagtaccactttgtaaacaacatttttgtagaatgcattatatgcatttttttcaaaattgaaggaaagccccatctcaaacattcaaaagaatcygctcaattatcaatgtagactagaaacagagatagagaggggagatacagtttgagtgttttctgtattatcatgacagcacatggaacaaccacaggcagaaagattacaaactctgcaataaatataaaggtattggttttataaggtggcctgcaggctacggaccagcacagagctctggcaaatgtggaatgccaggagatgtacaaaaaaatcaaggtgacaaaagaagaaaagacactccaaactgccaagggtttataatcatgctgtggatatttctgatcatcagtgtgttaatggttttcactatagttaaaactataccatttttgaatgggtaataggtatgaatatttatgcttaattagtagtttataaaatttatactatttattttcataatgttgattttatgattttcaacgagtgccatttgtccttaagtcatgaagtggatgagcccccatcaagtgattttaagagacagtaccttgactgagcagctggatcaaagcctgtctgatctgggcagagcaaataaggaatacttcttacaaaagaggaagcattcaattctatacactttaccttggtactccttgttctggaggcctcagcttctatcatgttctttgccacagtcatatacccaccttctaccttggctctccctcctcctaacttccattattttttctactttcaaactataattgacaagcctttttaatttcaacaagggtctgaagagaggtgtctgattttccgtaaggctgggttatataagcacacagagttgaatcagagcaaaggaaaaatccattggcaaaggaagaatactatatgctactttaaaacttgtctgaatgtattattttatttacttattttagaggcaggtctcactctgtcatctaggctggagtacagtggcatgatcatcactcattgcagcctcaaactcctaggctcaagggatcctccagccacagcctcctgggtagctaggactacaggtgcaccctaccattcctggcttaaaaaatatatattttagagtctgttttgcccgggtttgtctcaaatacttggcctcaagttatcctcccacctcagcctcctaaagtgctgggattacaggcatgagccatggcacatggctcaaattatataattcattagctggtaatagtgtaaatttggaagagaaaaactaaaatgataaagaggaaagatggattgtgaatagagtaaatatatattactgtaattatgttaagccaatcaaatgcaaaggacagttcaaaggggacaagtatgtaagccacattccaaaaaaaaaaaaaaagctttgaagtgaagctttaaaaagataagctttgtgttgagctaaagaaataaactctataaaaacaaaaccctaaaattgttatgacaatgaattaaacattcaaaaatgaacagaacagaatgtaaaagattattccttcaggtggtaaatgttcacaaccagctctctatgggggaggggaagggcactatttgtagtatttgctgatttctgtgccaaaaaattctctcacctgcccatttcaaacagcagaggtcactaaatgtggagttggcaagagatacatagacatagtactctatacagtgtttctatcatatagatacagtagatataagttgccccaaaaacataataatacaaaatgtagccaaatcattcagaagttatgagttttgaatacttatttccattgtttttaatataatttgtttaattatagttaaaaatttttatgtaatttaatttttaataactgttgggtattaacaactgacttataaatactcctaaaaatgtaacagaatgtagtgagggacaaaatggatgcggtctctgctttcatcaagtttacattctggtagagaaagacagaaaataaacaagttaacaataaataaaataaatagagactgagatgagaggttctgcttggggaagccagggaaacctttacaaagaaattgataatttatttgcatataagttcaagcatatccattccatacatctgtgagtacatttgtagttctaggcctgaaactcagaactgcacaaggtcaatggaaccatataaatattgacctcattactgacttgttttcagtctccagtctcttgagtgaatttacctttgcttctttgttattataaaaatacagtgagggaaagtaaaacaaggaggaagatgaaaagaagatgtagggggaagaggagcagtttacaatatactttctattacattgtttcacactatctcaaaactttttatacgtagaaaatactaaagcaaagaaaaatggaagttaaaaatcggtagcagtagtaatagtcctatagtaggaaccttgttttgtttgaaatatgtgtctgtgtctgcctacaaaacataaacaccttaagctaagaataactgtgagattaattttttattttcaaagaaataatacaaattttaaatcttgcattaaaaggaaagctagctggacgaaacttttctgacacacagattttgagaatagcacccataaatatgcttccaatgcttgtcacttgatccctttttggcaattaacttgcctttaattgatttgtggattacccactggaagttgctatggataaaggaatgtaatggcagagtttgtttatatagggtaacaaaatagactggctgggaggagggatttaactgcaaaatatccttgattttcaggaatttttcttttcacataatggcagtgtttagataaagaatggaaagttaatgaatcagatttgtgttcccatccaaagggaagatttatgtcctgtttaagaatcacattaatttgatgacgttagtacattctctagtgaaagagtggccactttagtggaggaaaaaaacaagcaacaaaactccttctgccatcttcaggttgtacctgacgaaaagcttttatttgtgggttctatgaagtatcactgccctgatctcagatgaactaaaagatgaaaacatttcatcgctcaaataattgtttatctcacatcttactggttctagaaaaggactatatattttccctcctaactttcctcagtttcttggtataaagttcaaaatgctttgagtagagttgttcaggaggtcctcagtggcactgccactcactggttgggacgtttttgttctctgtcctcctgtgtggaagatgacaaggacggctttgtgcaacttctgttgtatgcgctgcttttcaaccccttggatgagatactcatacaaggaacgtcaggtttttttcctaaagcaaatccgtgtaaactgagacaacataaaccttagggagatctgacacaccaaaatgccaagaaagggaaagaagaaattattatcggtgggggaaacaaattatcctgtattttggagtgaatttaaaaggcttattgtttgttttagcactacatgacttaaaaaaaaaagtctcgcagtcttgccttcctcatgttggttaaaatggaaaggattctctttctttgctatttatagataacccttagcactctgcaaggatctatttggtataaaatgatgggtgtgaatgtgccagtaagagagaaaaaaatgcttagccatatttactcatataaccaacatctaggtcaaaatcaaaatattaccagctcccaaggggacccctttattcttctttccagtcactatgcacccgaagataaccactaactgacttccaatagcatagatttgactacttttgaattttatatgaatgaaattatacaatataaactcttattttatttcagtcaatattgtgtttatgggattcattcatagtgttttgtgcattctttattctcattttgttagtattgcaccaaatgaatatgctacaatttacttattctagtgttgatggatagttaagtattccagttttaggccattatgaattagagccattatgaacattattggatatatcacttagtaaacaaatgtacatgtagtgttgcagtgttttgtgcatacacgtaggttgggtatatcccaagaggtaggatttctgggtcataggttatgcctttgtctttagatattgccaaatgtgtttctatactggttgccacatttatgtcgcccccaaagtgatgtttcagttctctgcattcttaccaaagtataggtcatccattttcagtgatggcatcttaaaaaatgtttgcctgtaataacaatgtcatcatgccttttatttatgcagttgagtcttttaatctttaggacctgtttttccaggaatagtgtgggtaacagtgagccattcacactctgtctgtttctcctcatgatgaatactatgtaactgtgaattaagtgactaaaataagaaacgatctgatatgcagaaatagagttttccctgtttgatccatatgcagcttaaatatgtgatgttattctacattttatccagattcatttttcaaaccaatagtaatcattgttagcaaaaaccaataaataatcttttattctgttttaaaatttccatgtcgtactttgagttcttgctatatatcccgtgctcactttaaatcaggttttccttcccgtacattatttcttggaaaatatgttttggacttttcctaaaccaccttaacctgttgaaaaacactagtaaatgcataggcagtgtaagtcacgctaaaataaatgtgtattgctttttcaagattttgtttacccatgcatttaaagaaggtttttttccctttattttctttcttttttgtcattatagtcattatgtctttttaatgttaagattccggtaatatatattcctcatttttatgtcatctccaaagctccccataactgattgatgatatcaatccggcttctggcatataaagtttgttgacctggttcagtttgtaccatgtcaaaatgtgatcattaattattagatgatgtcaggaaaaatttagtatgtgtgataactgtgggtcccatttcttaaagctttcaaaatccaatcttaaggctctctactttgtggcatatgagggaacataagtaaacattagagcaatatcaaacgtattctaagggtttcatgatgtgaaacaatatatcactttattaccagacagatacttcacatcgtgaaatttgaaaaagcatacgaggtggggcacagtggtttaccctataatcctagtgctttgggagggtgaggtgggaggatcgcctgagtccaagagtttgacaccagcctgtgctacagagtgagaccccatttctacaaaaaatttaaaaattagtagggtgtgatggtgcctgcctgtagtctcagctactctgggggctgagggaggattgcttgagcctgggaggtcaaggctgcagtgaatgtgatcacaggagtgtactccagcctgggcaacagagtgagacctcatctctgaaaaaaagaaaaagtatgtaatttttacgtaagagtcactcgattcatatcatgaagcttgtgctaaaaatggaatcattcagtgatcatgggctgcttttcaagcatttttcgctcaccctttaccattatgacagtaaactttggggaaaggggaaggcatgggccaatacatcttttagtatttcttggttatactaagaactactgaggaactgctaaggaacaactacatagataaaaagtatttttattataacccttgtgaaaaacctcttcccccataaaacgtttagtatcttgtatgaaggcataatgtacttttaaatattcaaatccaattccagatttcatttatgtgctatgtactgtgtaatccaccacgcaaaatgtaatttcttgcttttaatataaattttcattattatcataaatgaagtctcagaccacaacattttgttaggttgcattcaaatggtaatcataatatgacctataccagtttttgcatggaagggcagcagccggctgaactagatttccacttttgtcttggctcattaaacaacaatggacaagttaccttaacttcatgggtcctcaaccttctcattcgaaattgagtgtatggactgtatattacaatatccttttaagcttacagaaataacattatggaggtatgagaaaattgtaaatgatccaagatatgtgcctaaatatttcttcatacatcaagcatgcattcatgaaatcaacaccaagcccaggaaatatcaaagaatagctcaatgtccctgtgaacttatatccaattcaataattcatccaacaaatgtatattgagtatataatctgctagacttatgaagccttaaactttatgctgtacattctgatatatgttgttttaaccaggggttggtcagctttcaaaagtgacccttttgctaacattgttcttctggctgaaagctagtaagtataagcaaaaggagagatgtatatgatctcacttctatgtggaatctaaaaaagtcaaactcacagaggcagataatagaagggggttaccagggggtgatgggaacaggagggattggggaaatggtggtcagaggatataaaatttcagttagacaagaggaataagttcaagagatctactgtacaacatggtgactatcattaagaacaatgtattgtaaaccaaatattatatgtggtcacttataagtgtgacctaaataatgagaccacatggatacataggggggaacaacagacacaggagcataccagagaggggagggtgggagaagggagagaatcaggaaaaataactaatggatactaggcttaatacccccatgacacgaatttaccattgtaacaaacctgcacatatatccctgaactttaaataataacaaaaccaaaaaaaaaaaagaaaatttctaagagagtagattttaaatgttctcaccacaaaaaagtatgtgagttaatgcatatgttaattagcttgatttagctcttccgtaatgtgtacgtatttcagaacatcatcttgcgcactataaatgtatgcaatgtttgtcagttaaatatttttaaatgaattttttgaaaagaggaggggtgtgaaaatgaagactacttctgactttatattttatattctggggttacaagaatgagacctccctgatgcctacacacaaatggattaatgtgaaactgaaggtttacttgcccagtttacttgcccatgtttacttgcccagttgattcagctggtttatgtataattgtcaacaatttaaactctgtcccattcctccccaaaatttatgtactttaaaaatagatctcatcatttcaacatttcaatttatatatgagagaaataaaaaggactagtaaaaattatatgaagaagcaactccaaatatggtaatttatggttcaaaggagataggtaattgtcttctctcaagagccactagaccacaaaatatcaacatcaaagatgaatgcaagcgctaggggaaacgatacagatcagaggcaccatgtgttgtgcattctggtatttgtcagagataaggaatgaagctgaattttttcatggatttgtcttgaaggaaaataaaatgagaggttatgctaagtataaaactatctttacaaagttcctttccgttaagaccttcaaagatatgtaaaatcataatttgagaattgcttttaaggacctaattcaggttagctaacaaatcattatctaaaaagagagtgttagaatactatgcatttaaagtgagtagttcacttcatgattgagcagaaattcctgagttcaaatcatggctcttccacttgcagcttrtatgacatttatgaaattccttaagtgtgctctgtttcaggtgcctctgcgcctacatcattagagttattcaagtattaaatgagataatacatatatagccgttaaactagcgcctggcatagagtaaacagtcagctcacatcagctagcgttattcacaagaataggctatacatttctttccatcaaagataagtgcaagtttgaatagaaaaattaatttatgaaacaagactgattttatgcttttctatagtgcccatgattcaaaggaaaagaaggaaataatcaccaaccaagtgaccctgtaaaatagataggagttacgccatgcatacatacatgcatatatatgtattttggatatatatggatatattatgtgtgtgtttgcatacgcattatatatacatacatacctttgccaagaaaattggatgtctcatatctaaaaaactttcagtgttaagaactagccaagtgtcaagtacacaatttgtattcaacatatatttacagaatttaactttgtaaaaatttcaaatcactgttattgcttttcctacttgtaaaacaattacaaaaatcccttggcttttgtggtgtggactattataagggactctgatgcttcatgacagggagtaatttgatccaaagtacaacggagctstcgtgtggatttaagttaccaaactattgaagggacccatgcaccaccaagtattcaaatcacaatataatttcattattctctaccctcccttgcaaatgtaataactctgaactgataaacacattgtacctgtgtagaaaaatgccacccagaaggaagctgactgctaatctaggcctgtgctgtccaacaagagagctagtagccatagagcacttgagctgtggctaatccaaatcagatgtgctggtaatgtaacatgcacaaaggatttcaaataatagtgtgaaaaaaagtaaaaattttctcatttgtaattttcataatgattacatgtttaaatactaatactgtgtatagggttaaataaaacatatttaaattaatttcacctggttgtatctaagtgtccatcagccaattaacggataaagaaaatatggtacatacacacaatggagtactattcagccacaaaaaggaatgagatcctgtcatctgcaacaatatggatggaactggaggtcattatattaagtgaaataagccacacacagaaagacaaactttgtatgttctcatttgtgggaggtaaaaatgaagacaattgawctcatggagatagagtggaaagatggttatcagaacctaggaagggtagtgagtggcaggggtgtgggagtggagatggttaatgggtacaaaaatatatttagatagaatgattaagatctagtatttgatagcacaaaagactgattgcagtcacaataatttattgtacattttttaattaaagagtataattggattgtttgtaacacaaaggataaattattgaggtgatggatacctcatttaccctgatgtgattattaggcattgtatgccttatatcaaaatatctcatgtaccccataaatatacctactatgtacccacaaaagtaaaaagtaaatacattaatttcacctggttgtaaaaataactttttgtaatatggctttttaaaaatttaaaattacatgttgtggccatcattcatggttcacattatrtttctactgaacagcgttgatctagacagtagacactacgcaaaaacagctaagaaaattattaattctttaaaaggataaaatttaaagtgataaatgagatcaaattttatgagcaagtccatcgtagttcactctgtgcttgtttctagggaaaaaaaattggaactttctgtagagtgtgccagtcaatgcaaaagtgctcatcaagagagaattaaaacattagcaaataggggctgttgatgaaaatgagattccagagagggtgagaagactgaacacattcctgtaaagcaacagggattaatgcaccaatgagaattgcttttttttttttaaacaaaacaaaacaaaacaacaaaaaaacccactaaatttttctaggggaaaagtaaatgctagagtgatattagtgaattaggggatttgtgaagatgcatttgaatgtcaagaatataatgtagttttcttagtatttttgaattcagtgaccttttgttaacctcaagagactgaggctaagacaccaacatttaccatgtgcttcaatcattctctcaaggacgcacagctcctctgagctgtaataggaattcaggtctgtgtgactcctgagcccacatgaccgaacgtgtgcccatggaacactggtccctgcaactgctctgcaaataatggttctatacttaaatcattttaagaaatgttgcatgtatcgttaccgtcttaaacatgattcattgatttgcatattaaaggcactgagaattgctaaaaaactgtttaactttttaaaatctttttctcaaacttcttttgccacagaacacctcctcccctgcacatgcatctatatgccatttatcaccagttgcatgctgaaactaaccttagacagaatgctatttggaaatgctgagatgccttaaattgccttctatcatctctcattattagttactaaggaaaatggctttgagaaaatataaaatatttcaggaaaatatgtaatttgatgctcagataactcactttttgctacatcagaaaaagcaaaactagaatttaaaaataaacttggatgcatgtcttggttattcttatattcatagtgtgtgatccaaagggagtcaaagaaatctgtagcgaggctgctcacagtctaggtctctttttgtgtaggacaaaggtagggcttggcttctagttgaagctacagttctgtaggacttgggatttggaaaagtaatgacaagataaataagttatcaccatcagagacctaaatggttgcaaatttggcactggttacataatgaacaaaagtttcataacatatttcataagatattttcataacatatgtcttacaattactttttttattttctgaggttttttctctaaattatgctaaaaatgtcatcgagaagcataaaaacagactttcattaatagttgctatagcagtgggaaatttttgtaggaatttaagtaaaaaagcaagttatttagcagttttgttcaaattagacatttctgccatcagcctgccccctgggaacttggaaagtgcatacttgctcttgagttctgctagtgccctaaccacacgcctttcatgtctaccatacttcgatgatcttggattcaaatatgatcctctgccttcctcacagaaagaaacaatttagggacatggacttaatggtaatgactttcaaaagctaatgacgtgcagtctttcggcactgcctagccgaacactctttagacaacctgctgctttagactggacatgcacatgattcctaagatacactaaacaagaatatgagatgctgagtccattgtttcctgtgcaaaattcagttcaccaagaatactattttcaccaagaaagccatagactgtgtgtaggtaaagaacttttgcgctaatgaaacttgttattggctgggactaggggcctaaatactagtttgagattctgtttctgctgtgccatatagcatgagatmccacttttgcctctataaagcagggctatggttatctttccttattacctcagttgattgttggctgtgagaaccaagtaagatatgcttcatggaataacagaagaatgcaagatattatcacgggaggcaacatttttgggatatcacatattagtggaaacttaaagaatatttgagaggttatctttgacatttacataaaaccatgtatgaaacaagtagttcttgtgtttttttaacctatgaactttttcaagtgttttctccacaacattcctctcttctaccaaagaaaatcagtttacagtcatgtgttttgtaaaagcctaaatgggaatgaaggtggttagtaagagggttcacaagatggagaggctcccatgacatttgtaggtttaatctcgtgccccatgacctcttaaaatgtccccatgcccattcagaataccccaattcacttcaaaggcaaaaacaacgtgacattgtgaaatcataccrgatgttctagtagaactgtgttctggtcctattgagttcacccaggagaggcatcaaactctgcaatcagaacatatcaacacatggcctattagctgattctgccacttggtagctgtatattctctctctgtttagtgtccttatctgtaaattgaaataataataatagctcataaggctttgtggggattaagtgagataatcatgtacagtgcccagcacagtgtctactgcatggtaaatactgcaaaaatgttagctgttgactgctcctatttatgaccttcattattaaaaaggggaacttaggctgacgcaggagaatggcgtgaaccccgggggacggagcctgcagtgagccgagatcacaccactgccctccagcctgggcgacagcgagactccgtgtcaaaaaaaaaaaaaaggtgggggggggggaacttatgaatgcctttcacttataccagcatcattaaaaatttaagttttttaagaaccatgaaaagctaaccattgacaatttaagaagcatgcaagcttggtttacaaaagaactggacaagctcagaatgggctagttcagtggagtgactgctgcaggagctcaggttttgagaccttcctgtcttcttccttcatccttctcctctttttgtgttctctccacacacttttcctcatcaaagccaaaacctttgttcttgctatattctctttttagagcctgctcacagtaaaattttaaaaaaatgaagaagtgctgaaagtgtagataagcaattagacatgagttaatgttttttatttgcaagagcatttgcattctaatatgaactgaacattgagtaaatagattcctgactccctaacagggctatgtcttgtgtcaggaagccagcgcactgggcttcttggtaggcaggagacccaagtcatcatctgctactaaggctgggtcttggaagatggagaaggccgtagaagaaaggaaagccaaaaaaagaaaggaatgagattttgatatattaattagctcatacyataagcctggacttttgctaggcattttccatggtaatttggttatacctcaaaacaattctcaacattattatcactgccaccacttctgttagcagctgtgagaacagaggtcatgtgagtaagcagtttgctaagggttgcatagcttaaaaagtagtcaataagctaaagtttgaaccctgagatgcctggccttcacagctaaacttttattaattacacctgcttctaacaacaacaaccatggctaaagtttcattaacctaccagtttctaacaacattaacaaaaacattttcaaaaatataataatagtcatcaataggaataaagggaaacaatccaaaaatagctctgttgaggttactgatggatggggacaggaaagtacaaaattttttctacgaaagtttccctttgaggatcactttccttggctgtcttgccttgtgaaattataccttccctaatggcttggagctgattgtgcccttctttctgtcaaggacagcttaaacttcatggaatagtttatttgaagcttgtgggtaccaattccaggcagcaagatactactttcagagattcaattaacttccttcagagtcacagcaaaaagcgatagagctaaattgattaccttgaagtgccttaaccgttttgctgctgttgttacttcttgagccaatttattctcccagcaatgtcactgttactgaagttggtctgttctttattctcagtttatgaataggaatcatctgaatatagttatagacctctagtctagatcattttttgcaaaattacaaagatgggaaaatttccaagccatagttattccaaatggctgggagtgccttaggaacttatttctggagtcttttgaactatttatattattgatatgaacaatgcccctgattgttagttagcaatctattcattgatagggacatgaaaggcagtctgctgccatctagctttttagtttctatctttaggaattttccggtcctttcacagaaagacactttttaaaggagcaattcttacttcatccctgagagggagacacttatgaaggtactgcagaatcttaaaaaaaaagtcttcatcattcttttacttctttttgcctttaagttggtcttaaatgggtaaaagtgataaatgtaggttgtgtagttcaaatccattgcagtgactaagcagtgaccacccataggggcaaaaactatgtatttttagaggcaaagattgataaccacagccatgaccctgagcaagactgtgaaatagatgcagttctttgccatcctcccttttcctgagttatgggcactttctgccttcatagctgtttcctctgcaaaatggagattttactgtcagaagtctcctattgctattgcttcttggagttggttcccatgctctgggcacaggaaagcaatctgagatcttcactactagtatttattgagcacctatactatgccaggactggactgtgctctgaggtcacagtggtaaacataccgacatggttcctgctgtcatgagccttccaaaggaatagcgaagaaaaacattaaacatatcagcccatgattaaatgcataattagataaaatgcattgaagaagtaaagatcccaggaaaggagagaaccaattaatatgatggatgggaaatcaaggctgctggaaggaagtagtgtataagctgaaaaatgaggagtgaataggaattagccaagtgaaaagcagaggcaaatgggtttcaggaaaaggaaaaacatatgtaccagtaacatttcaagaagaaatgggaaggattagatgatttctgttattcttattaggttgatctcttccatggaagagacacacagaatgtaattaatttatagaatataaaaatgatttttttttttaggaatggggaggtgaggagaagacccgcttcaagttctgttccaatattaatatggttttgctttctctacaaacctaagtaaaacaatggtggtaccaagggttggttgggaggcactagttttcccagtgtacatactcacaactaacataaaagctaaatacgtataatcaacatgcttacactacaaacacaacttcaaataaaattcactagatcaaccgggcacagtgcctcacacctgtaatcctagcactttgggaggctgaggcgggcagatcacctgaggtcaggagtttgagaccagcctgaccaaggtggtgaaaccccatctctataaaaatacaaaaattagccaggcataatggcaggttcctgtagtcccagctactagggaggctgaggcaggaaaattgcttgaactcaggaggcagaggttgcagtgagccaagatcatgccattgcactccagcctgggtgacagagctaggctccatctccaaaaaaaaaaaaaaaaaaaaaaaaaaaactccactggatcctctcttccaacttttttcccctaatttcttcccttagcactgatattatcaaacaagtggccaatcctataaaggctatcagactccaatttaaaaaaactattaaatttaaaaacactcagagatataatgattgtatgccttttatgaggaaacttagtacctaaaagaaaaccctataacttaacattaagcatatgaaggtagctattattcaaataagtagcagtaaagacttttcagctttggatcctcataaacaagacctgcaggtttaaagatttgcatacatcttttaacaatgcatcatttttattatagtatattatatactattttatatttacttaatgagattactgacctgggtttcaagatatgtatgaaatataattaggatatgaaaattaaagataaattatccccaccagaaataatcttagcaggttatttactaaagaatcttaaatccagcagatcaagaaaaactccccaaggagtctttaattagaactctttaggatggaatcaaaatctctccataaaaaatgaatcttgccttaggctacataaattacaaaatctgaagccctttaagcagcattaaaactgctgattttaattgctctgataatgaactggagagagacacactaagcttcctggatttctgttggaaatgaatgggattcttgccaactatggatcacagttatgaggtattctgcacagggaaaatcaaaagaaagcagatggaccttgacatgctatgccatcctatgccttcttccttcccaagaagcatgttacaataactttaagtgaaggttgtcacaactttaagtgaaaagtctcccctttctgtctaatttttaatgtaacttcccccttctcgatatatccagaaaatagttaataacaatccctgagggaaaagaaaaatgctgcccttcatattaaaaaaaagaagataacagagatccccttagtggtgagtgatttatagtgaaaacagccaactcattctcttttgcctccttttgacctagagaactggattcgcggatttgtaactggattttgattatagagtatgttctatggctacaaaagagttttcctttgaggaaaactcaaactgccaacagatatgcttggtatatcagttttcaatgctttcaattgtaaataacagaaacctggactcacaatagcttgaacaaataggaattacttttaagtaggtggcaccggaggtgtttcagctgttgcatgatgttatcaccatttgcaaagaggcagcatctccacaattttcttggcctgttcctcttgatggcaaatggctactgcacgtccagatgatcatgtctgtgtcacagatagtgagagggaaggaggaaggatgagagaggatggccagctaaagttgtatctaccccacttataagaaacacaaagcccttccccagagcttacagccctttagccagaactatgacacatggtcatcttgagtgcagaaagatggaagttaacatttggttttctggtctttttaataaagatagcaaggatgaagaagtttggaaaagactgtgggctagccaatcaaattgtcgaccacatttggcctgtattaatgtatagtttttaaagcctaatgtcaatttgttaaggtgtcttaaggacaggaaaatggagaagaactaagattttttatatcaaatacagagtaaatcttggaaagggtgaattagagtggaaaataaactagacattatctaagagtgccttgaagccagatcttgcaaaacattaggcaagcatgtcactcataatggaccccagggctttccatctcataatgtggataaaaataacagtgtttctctcagtttttaaaaatgtcaccaaaaattcaataaagtatatacatacatattgtaattgtttaaagtaaaaattttatgctgttttgggaagaaaaataaccaaaaaaaaccatcactgaccattggtcatcaaaatctgatttatgccatgtttacaagataaaaacaagaataaataataattgtttgaaatattttcatcatattgcctctgaaatgattgatgtcatactgcctggatttagtcaactcagtgaatgatttatcagtagccatgctctaaggagctctctattcatagatacttatgatttggtgaactgggaaacccacagagaaaggtaaatgaaataggagagccaggtaaatgggccatggatctaagaaccaggaatcatgattgtttggaagaacatatctcagactgagaaaagctggcgctaaagtaagctagcatttgattagaatgttgaaggataatttcattcttggagacagaaaacctaagtagaagcaaaagaagtaggaaatagaagcctgtgtttgagagattcagagtgactgtgttttattagaattgcaagaaagggaacttgaaaacataaatttaacatggggcaacaggccttggattctgaacagagggactttgtttaaggatggctctgtggctgtggaacagtttttctatagattatcaaaatgattctggaaaagaaatgtcattctggactgagagcacataccatagggaaaacatgaggcttatgggctgaattgtgtcacacccaaagtcatatgctgaagtcctaacctaggacctcagaatgtggctttatttgaagattgagcctgtaaataggtgattttgataaaatgagatcattagggtagacccgaatccaacaaggctggtgtctttataagaaaaggagattaagatgcacgcgcacacgcagagaagactacgtggagatgaggagaagatggccatctacaagccaagaggagaggtctcccgaagaaaccaaccccactgacatcttgacctcagtcctctggcctccggaactgttttaaaacataagtttctattgttaaagccacctaagtctgtggtattttgtaatggcagccctagggaaaaactacaatgagcaagtattatttgtattttaagaaataatattataaactaaattcatggaggggaaaatagaaaaagaggtcatttctgaaaacattgtataggtgtaacatagttgacactatcaactactacaatgggatcaggagacagagggtcagtgataacggagctctcaagactggaaactgggcgatccagaaggacaggcggttgatgaaagaaaatgatgagtgtggttgaggctgcgtttcccttgaggaggtgctggtgctcagggtagaggcatccatcacgatgtcagaaatgtgtgtcagacacgaaggcaggaatgaggctgtcgaggaagccatggcaacataaacagagaagtgccacagcgagacaaccagccaatgagttgtgtagtttcttgtaagtagctgaaacaacataaccaaattgttcaatttagtctacatatgaaatttcaatgtcagagaaaggcctttaatctcaaaacgaaataaactaaaagacattattttcctgacagctaagtcttaaaatttcttttgagaaataaaaaaaatggttttctcttttaacatagaggcaaaccagtaagtcagatacttcaggggaaggtagcttggtgatttgaatgtatgtgagtgtgaatacgtgagattagaatcttacctgagaacaaattttcatgagcatcattggagagtgggagagcatgaagacttttacccttctctctgcaggagagaattgtgcaggaggaggtggggagaatgccaccaagaacaggttgcctggggctagtttagcgatggggtccaaacgatctcactaatgtgaaaggatcatagttaccttaccaagggaaagttggcttcaactatatatttcacttctgtaccaggttttgcttaaatgctactctttggagaatatcaagaaatttagatgagtttaccaaatccaagattgtgttccctgcttttaactcttgttactgaaatagccccctgatccccaagagtaatgcttgactgaggtgtttgcatgaattgtttatatcattcattaattaacgtgatgaacatattaaagataggactcccagttttcatcccaagggcttacatataatagtaacaacctttagaaaagtactgcattgtttatttatagaatggctttgactcacttaataatgctccataattaatttgtaaattactttttgactttgcacaattataatttaatgtcatatatctgcaaaagaaaacacttttatgttgctaatattaatttcccttcataaatttgagactgttttgactatagataaatgtaaaatgtcaatgtggtgagaatgactcagcttctcagatattcatttattctataaatatttttgaatacctactatgtttcaggcactgatctaagtgttgaataagtagacaaggacagcctgccttcaggttttttacattcaaataacacaagatgatgaagaaatttttaaaataatctggttccatttggcagataatatagatatgctcagttttataaattttgatacctaaagtattgtgataatccaaatcatgacctttagacattacactatgcttattgattgaaggttgacatatgtttagcatattctcttataatgtatttaaggacttcagtgagtagacaaaagaagtaaacttgatcagacaacatgatttctgagaacagactcttcctggagcaagcattctggttagattttacagggcttcaataaaaaggtatatgtttatgctttttgctagttgggggtttcctagcaaatgattccatgaaaacatttgcagggaattcccatctgttctatatttccctgatttgggggctctgaatcaataatgctgatgtaacagttggcaaattagataagaacagcccgagacttccttttccattaggtgtagtctcatggaaaatcacccttgaatccatcaatggaatgaagcaactgggtggagcctatgggaaaatcctggaggaagtccccaactagtcagcctcccctctctgccttgcactcttggattccttagcgaaacatccaaaatggccttcttgcaaggaggatgcagtcggtgatccacatactgaccaacagctgtgtgtgaaaggcaccgtgcccaccacaacaaaggggcagtgaggtctgctgagcagatgagtcgcttttctggacccttccaggcttgcagttggctcagatgaaaagctcaggcttatgagctgccagaaagtatttggcaaaaagcccaccttttttctcaagtacacgtattcaattgacttgattcctcagagagatttgtgagggtgaaagcaagttcattgtccacttttaatgaccctcaacttctaatgaggtaatatatgtgaaagtgatttttttaaatgcaatgcaaatacagggtgtttttagtcattatttcagtacctgaggaaaatgtaaaaacacaaagccacacatgtaccaaggcactacatgagtgtacttggtttcaccatctaatttagccctctgaagtgtagagtccatcgaggctattattttgtggattgtgtactgaagttgcttttctttgttctcccaacatacacttgtgacacttccaacctctgatatgtatatgttaaatacaggctgtttttcaaacaagataaatcaaatgctagctaggaagtgtgcctagagtttaaagcattctagaatgtactcccatataacagctatacttatataatacctacattgtgccagtgtttcatatatgtgaagtgctttaatcctcacaacaaacataggagggatgtagtattattaccccctttttacagatgtgaaaactgcagtacacaaggtgaagtgagaggccccaaatcacacagctagtaaatggcagtgtcagacctcaaattccactagtctgtcttcagagtctatataattaaccactgctccctgtgcttttaaaggttagtttaatggatattgtgctatttctaataaaaggatataatttttgttatatatttttcttcttagtcttcacttttggatcttggaccacatgtgctattatcatattttagctcataagagacttctctgataattttgtataaaatacacttatagaacatttgtatcttgtaaatgtaatttttcttaccattatctcatttgatcccccttatccacctctagaatatacagagctttatcctcatttttcagacgaagaaatggaccaaagaagactaaacaatttgttcaactccatatcaccagtttgtagcagttctgtgactagaaaccaaatttcctggctcttagtcctacattctttctagtatttcaaatcatcttttcatttctctcccttatgcttttggaaagaaaattgagaagaacgttaagaaccccagtaaaattggagaggcatttcttgagaaatatttaaaataatttaagaagtcttcacaaaagtagtaggcaaaaatgtgttacattaacaacggatctcattaagtcagtgcatacagctaggttctggtttattaattttcaattttttcatttttgggcctgcctaatctgaacactttgcagtacaattctgagtgctctcatgctttgtgctatcgctttcttaaggtagctcatttgcacttgttcatcatcctgttccttcccccagtctcctgggctctgttgctaattattgacccaggaaagcctcagaaggggccaaggcagctaaaattggagtgctctttacttagacttataatgcattttccatttttcagaaagagtaaagcacttttagctaccagatccagagaccattcagttatatgggcacttgagtttctgctaaagaatcacaactcaatttaattttttttttttttggtatttcattcacagccagtctggagtgtgtgtgtgtgtgtgtgtgtgtgtgtgtgtgtgtgtatttctgtttctgtattaacatatgagacagcagaataataatgtgtccattcattccatagatatttctcaaagagttgccaagaataaagaatagtgctaaaaaaaggtggaagatggttaggtgtaaaattacctcctctcacaggacctggcacatgacaaatgcttcagaaatatttatcaaactgaaatgagctattacatgaattgtattctctggctttggaatctattggggaaatgatgaagtcattaaatatatgcgaattggaaaggaatttaggaatcatcttatgcagcccttttactttaaagatgaagcaatggaaatgcaagaaagttatgtgtcttttccaagcaagatcacacatctatttcgaaataatatgctttttttcattgtaacatgtgttttagagattacacatatgtcaatgtctgtagtgcagggcataatgtgaggagagctgttgaatgctttagaacagtgctacccagtggaaatataatgcacaccccatatacaattttagatttttattaatagccagatttttaaaagtttaaaagtcagtgaaattatttttttcatactaagtcttcaaaatccagagtgtgtattatatttttgacacatctcaatttggactagccatattttaagtatttaatagttatatgtgtcttggggggggctactctatagactatatggctccagaatcacagagagggaaaaataataatgtatttttaaagctgcagtatttttaccatgggttatatttttaagtttgattgtaacacaaaagtacaaaaatgaaacaaactgactcaacacattttttttcttttttttattattatactttaagttttagggtacatgtgcacaacgtgcaggtttgttacatatgtatacatgtgccatattggtgtgctgcacccattaactcgtcatctagcattaggtatatctcctaatgctatcccttccccctcctcccaccccacaacagtccccggtgtgtgatgttccccttcctgtgtccatgtgttctcattgttcaattcccacctatgagtgagaacatgcggtgtttggttttctgtccttgcgatagtttgctgagaatgatagtttccagcttcatccatgtccctacaaaggacatgaactcatcattttttatggctgcatagcattccatggtgtatatgtgccacattttcttaatctagtttatcattgtgactcaacacatttaaaaaaaaaatctagagtagacctatacaatttgacagattgcatcaatagttacaattttagacacccctacccctccacacatagaaattagtgaataagcagactgtcaatagtactggctcaaataattctacatacaagttctaccaaactttcaagggaggggtaacttctaccttatacgaattatctcattttacaagtaactataagtatacaataagttccatttgcagcactataggagcttgaactgtctgccaatttttaaagaatatgctcaagcaataatcttggttatccatattatcttacatttccttatgaatattgagagttctgttattgataaatacaaaggtgtcactgtttaatacactactgtgtaggtccttttgctatgcatttactatttaaagcgtaaaaacgtaggtagcaagaagatttatctttctggctattcttgaaattcctgtttctaacaagatattctgcagaagcaaagatactactgcattgttcaatgtttccacaaaaggttaatataattgtgggttcagctatcaccttgaccttttcttggatctttgatcagagtttaggtaaatatgttgttaggtttcccccttttaagttcctgagcttttgaagtaaaaccagagctgagataggaaagtgaacagcaaggggcagagcacagcagaaactgaattaggtcacttttctagaggcttctgaatttggtacagtaggatttctgtgatcatcttaaacctagcttttcaaaaggctattactgttccattttattctctggcccagaaaataaatcagaagacttctacatccttttcctcaaaagctgattctgattctctatatgatgccacattaataaagttttccctattaattaccatgatgccatgcagccttctaagatgttttctttagttcttagttcctttgcagttccatctccaagcataaattctcattaataatcagtacagtgaggaagatagacatgtgtcagtcagtgagaatgcttgcagctgtaactgccagaaagttgtaacttaactggcttaaaccaaagccatcctgaggtgggaggctccaagtcactcagtgacattatcaaaggcggcctgagtctttttcatctttctcttctgccagcctcaagtgttggtgagttttctggtttgttcctgtaaactcgagatgtctgtcacaggtccacctattacatgcagataactatggccagtcagaaaagaggatcttctttttacgtcttcttttaagaaagaaaaaaaatcatttccagatggtctccccttgtcccacttcccttcaatgtcttattggccaaaatggtttcacatgccgatgtcttaacaaatcactgccttggaaatcgtactttcatgattagctgagacaatcaggtttccctcatggtggctggggctgaggcccacctccctgtaagtatgtggctgcaagggtaggtggatatttgaatttcactgggggcctagtaggaaggaatggctcttgggtaggctacccatagagtcaactacaagtaaatcagaaactatagtatcataagtgctacagggaaacatgtaaatgcaggatgctgtaggaacacgcaagaagggcccctggccatgcttgcttgagcaagagggagagaggaatgccagagtgggcttttaatgaaaatgttatctgatctgagatataaagctcaagaggagatagccaaggaaagggtggtggaaggagagagagggtatcaggtagacacagtatcatgtgcaaatgactgggaataagataaaatgtggtaggtttggggagatgcagaaaaattagttggcctaaggtatagagcataagttggggagtcagtcagaaatagggctatagaggtaaactgtagatcataaaagatctgataagtcacatagaaatttctactttattctgctgcagtggggagccagtgaaatattttaagcagcaaatgacataattaaatatgcacttcaaaaaaaaaatgtctttggctgctgtgggaaattggattgcaaatcttcaagaccaaaagtaggtagaacatgtgagaatcaattacaatattccaggaaagagtggtgaagggctttaagataatgtcagtggggctggagagaggtgaataggtttgattgatgtttaggggttttgactaaacaggacttggttaataggtaagagaaatagggattaataatcactcacatttctggcttggacaactaggaggatgggaatgacatttactgagttaggatatccaaagaagaagcagactgggggcaaggggagtgaattaatttaaattgtaactaatgaagggcttattctgtatgaaattcaagagaagtattccagtccttaaagcattttcaaatgccaagggatatattaaccaataagtggtatagaacaatactaggggtactataatttatcacagatggtcatcaataaagcaagagagagagataaaagagcttaaagaagaaattgcctctctctcagaaagaattagtgggagaatctgatgttcttcatgaaagaaaaaaattttagttgaatcttgcataaaaagattagacagatgggaattgtcgagggtggaggcactgtacactacatgaagcatatttaaggaatgataacagtctagattgctagcaagcttgaataggcaaaataaaatagaaaggttagggaytagttgaattagtcagaactgttgagattccaagagaaaaacaaaattcacattttctgtgttgatctattattgcaaggtgcattagtcagctattgctacagtaatgctaccgaacaatcaactacaaaataccaatgacatttgcttcttgctcatagtcctactaatgggtcagaatagtgctgcttcaggctgcaggttgccttcatgcttgttcttcatgtttctccttcttggaccagtgatctcccagggcgtgtccttgtggcacagtttacaactcccaatgtggcaagtagaaatgttcaatactttgtaaggcctcagtttataaagcagtatcatttgtgcccacattctgttagccacagcacataatrtgactaaacccaatatcactgagggaggagagcatgaggaagaaaaggatggtgaatatatgctgcaatgcctaaaacataatgtaaatatagatagcattggatttgacccataagccataaagattctagaataccagtgttcccaactatggagtgcccaatgagcttcttgacaaactcaggagagtaacctccatttgtgtgacctcctttctttgctctttatttgtgcttttcaaagggatgacatgagcccataaactactcattgggttgcttggtcagaatcagaaccagttacttcaggactgtctcatttcatgattagttgcctttggtctcatgcagtggtatcagttcattcctctagaggtttatgttccctcaatcaccagcaatactgagtgaatgataagaactaaagcaataaaaaatgattgaactattttccttagtatgtagttattggacttcttccaaaaatccagcacacttataaaaaccaaactaaggcattttgctggttattgtgccaatagtgtgtcttaattagtcctgagaatttatgtggcccatgaaagaggcataattttcctaagattgcacagctaagttacatatctgagacttgaagacatcctcagattatgttatccctaaatctctaattgctwtgtagcaaaagattttagccatttttttattcctgaatcaaggatacataaataaagttgtattcaatcaatccaaaaatcctcaagcccaaataatcctagtacttgagcagaccttatagtgtgtgtgcacaagtgcgcatgcgtgtactctatttttagattatcttttaagagggaccggtgacatggtcatacagtacaacagaagaactcactccctgtttctctataattcccatattacactcagcacttgctctcctttcattctgtggcttctgtgctgctagcagtgaccagtgactcaggaaggctgcatatagtgaagaaaaagttgcctttccaggcacagttcagtcctgaggcgccttttcacaccatctcatagacatttcagagccaaactctagctttctttttatgactacttttccattccacacttttcttaatgttgcaggagataatttgaaagaaaggaaaaaagaacagggagaacacaaaggcaagaagatgagcaagatgccagatttaagaagtatatttatatttagttctttacaaattaaattctgctgagacccttaaatattagctgtcacaggggttgtgcttgaaaaacttgattccaaccctaagcataaaaatcttgtctaggcagggcagtagattggaggattatcattacacattataggaggaaggccctgttcaatgccaggttccaagaatgccatctcagggagcgagggaaagacataggccaggtaacatgtctgatgtatggagaaaagccctcagggtgccatgttggtggaacaggagcagaaaggaaatcagactgagagaatgaaaactcaatagaagcacaataaacagactgaacaaagtacagatggagtcagttcaagtttaatatgaatgtccctgggccctgtgtttcatcccagtgttaagtgcaggaaatcattggatttctccaaggatgggtctttagagcaaccgactttagaaattgaatactttaaaattattttctataaacaaatttatcaatagaaaaaatagattacttaattggtttatcttaatgagaaaacaacaaaaagcttcaacaaataattgttgctgattggttggtgggttcgttggtgaataatgagaaggaaagaaggaagaaaagaaaagaaggagtagaggaggaaaggaggtgagagagggagatttgaaagggaaatagcggtgctctaagttcacaatttttaaaagcctagagttattaacaaattatgccctcaatcagattttatataacttttttcaatcttgtcatatattaatgtgctgtattcatgaaatgattttgagattttaaagcaatgattgacaatatagtagttcatttaaagtttttacaagttgctgctgacaaaatatgggtaatgaattacatcaaataagtataaatataagtacacgctttgaagttaaaactcagtaagttgttatgattaaaattgttcactttattttcctcctgtgtatgggtttctcataaatggtaacttatacctatgaaaatacagggttctataaagtctgaaaacatagttattatatatcttaacggaccgaagatgtccttcctgatattatgtatagcctgtgtttccagactaagtgccaggcactattctaagttaggcacgattctaagtgttttactgttcatttaggctgtctggctagtgtttttctcaccttatcagcatcccatttttattaagtgaatttgcctaaacacacctgcacacgcacatgcatgcgcgtgcacacacacacactttttgcatttggaagcctggctattatggaactctagaacatgagagctcagggtcaaccaccaagactcaataaggtatggctggggatgtgaccaagactatcctagcatctatggctgtggactgggtgtcttctccactgacccttgaaggtagttttgcttcactgctttagaaatggtgcagagacttaatcttatttcacttttcggtgtttgtcttggttcctgtagaactggcttgaggcttagaagatgtcctcccacctgcatttggaaaaatacatttctaacacttctcctcatatggaaatttttaagtcattgaaaaactcatactgcagcatttgtagaaacaatttcagaacagagtaccttattgcttttcctaaaagaattttaactgtgcatgtataagtattataaatgcataaaatatatagttaatccaaaagacataactatatcatgcatagtagttataggtcacctcagatatattagtaacatctttttatagagactctgttgttatttcactcacacaaaagaataaacacagaattaaggttgaaatttacataagaccagtctaaagccagccatagctatgtaatttccatgattttctcccaatcaatggaaaattactgtcagctgagccaaagtctgcagactgtgagcaaatgtctgtttccttcccacaactgagtgtttgaaacttttttcaatcagtaaaattaccattaaaggtcagagattagtttttcatgcatgatggattccatttgctttaaaagtattataccaggagagtagactttttttctgactttagaatcaaattagaattcaaatattcagagttttgggtcaacctcaaactattttattttgtttattttcccttgacaaaatgttattgttttaaatagggaaggagaaaggtcttgggaaaacacacacacacacacacacacacacacacacacatatatatgtactctctcatatttgaaattagcatgtagtttaaggatactgcacacagctctatgatgagcttaacttgaatctccttagattatgagcattttgaaagcagggacttgattttttaactaaatacctttcatgtttgataacctgttccttttcctgtgtgtattgtcttaactaaagactgcctgcaatgaacagaagggctatggtcttttttttattaagataaaagaattttccaaatcgttgtttataaaataaaagattagaaaaattcacctgtgtataaattgaactagacttctataacatagcagccatcttgtgcagaaaggggctgcttacgtagtttatttctttaacacacagttgctaattacaaaaacagcatgcatccagagattgtgaaaaaagaagttaaaaaaaatcttgcctattattctaccaccgtaacacaattatgtttaacatttttcatatttttaatttattttctctttccataaattctaatctgtctataaatgtactattgtggtctgcttcgttgactaacagaatattttcacccctttcagaaccctttttttaaaaaatggcttcttttgtgtatttgaaacaatttcaacttaaccctattgcatatattctgtaagtagctgtccttcatgaaacagacaactttttcttttaaaaatcaaggagattgtacagaactttgtgattttaattactgcatggcaaactaattcagtctcatatcctttccatttaatagggatttgtccctagctatgtgacctaagcaagctctttaactgtactccacctcaatttgcttatctgtaaaacatggataatattatttttagtctaaaacttcctctggtatgacagaaaagaccaatgtgaaacaattccctgaatttgtcaataaaccatgttacatttataaaaatgcctccagtgtacccagaccagaggaatctgtggcttatactaaaacgtgtattatgtattcattctcaaggtatatgccaacagttaagttagaaatccatccctttctctgtcacttgtccaaagtcaattactccatgcttcttttacataaggaaaactatcttaaaaggaggaagtaagatcacggacaaacaaaagttcataaggtctttcattttactgcctttcaaaaggttaagatcagagaacttagacatgcataagctttggtttgaggaacaattgagtcaaccatcgtaacagagggcctgaaagtatctgaaggtagaatgaatagtttatagtaagccagtccactctcagctctgagaacatccagctgcataacctcaagggaactgcgtggaaaaaattaagggaaattctttgggctttagagcttttcatttcctatgaacaaggcatctcctgcccttgtctcacccatatctccattgtcctcatgtagtcttctgctggttcactgtgtgcctggcaagtcaggttcttacgcgagggaaagagctgttttaagttgtttatgaatagagaaagcagattcagtcagacgtaatctgactctgtatgcctgcaggggttgtggcctttgttagtttattatgcctgtaatttgggaagtcatgctgcagagatgtaaagtgggatgggcctgaaataggtcttgtaataaaaaggcagttagggaagcctgctggtgtcctgcctggttactactatctaagtgcagcaatgtgttagttgattttaataaagagttgaaatcattgttaactggcctccctcccactgagtgaagaaggcagattacacaggcacacgtttrcctcccctagtgtgtactatgaatgcagctgcttctgaagggccagcacgtggccttcttaaaactttccttggctggggttttcccttcttgccaactggtgcccaccaagccagtggatgctctcaacgtctaggcaaatgccaaaaatgtcatctttggctcagatgtgcactggcctgttagagacaactgccatgcagagaaggaatgtcatcagctgctaggtctcaaattatcagcctggattgacagctgcaggatgtagtgcctgcctatagtactgaggccatgacccacctctggagagaccacagcctcatccctagagtagaactggaaattctccattgagacaggaaggcagcacttgaacctggcaggttttggagtgaagtgtctaaggacagaatttctcatttctccacctctgcccatgtgtaaggcagcaatattttcatagaggtgaagaaggcaggtgtcccgtggttattatgacatctgtttacctcattctagtcactgtgccatgtttcacagccattgtcaactacatttggtgaaaactgtttcctccgtccacaactggaacattgacactaaccacattctagagttcattacatagagctgtgtctgtgggtaagttaacaggtagttttaaataactagatatagtcttttcctcttccatgtaagccaagataatatttccacttctccttctgaacatgtgagtacagtttatatataaatcaacagcaagatggaaatttactctgagctttgtgatgttttcactttaagatgctgtagttctgatcctttatacatttatttcattttccccatctcaaccccagtatatagcaacactcacctgctctagaacatgattatcaactgtttcagctatcaatgtaacattaaaaaaaaagttctatgttcaaagactaaaggaacccaggtagtttcttttaaacagaaagactagttttcatgatcataaacatgtaaagaaatatgtcatttttgaaatttcatgaatcttatgtctataccgattccaattccaaactcagactggcaatctgcctttattattgcaaagccccrtagcttgttatcttcatgtacctcttgatcaagtatttaagtgaaataaagagtctaaatgttacgggaggtgagtccaggcagggtctacggccctcagtttttgtcttcctggaagaaaaaaattcagctgagagacagatgtagatttcagacagaagcaaaagtttattgaagcaaagtacatttggaagggaccaagtgggcaactggaaagattgagtgtcccgcctgattattggctcaggactcttataaagttactatttcctgattcttcctgatctcctcccatcatacttccttttgggccagctgttggctaatcgccgcgtgctcagtgacttgccagtaatctgggaggggctgcatgcgccatttggtggttgtagttatgcacatgtactctttgggcaattttcctttactggtctagtgcccccagaggaaggtcatataccagtcaaactttgccattttgccccttactgtgcatgcctgctcaattcctagggttttatcgcaaagttgttgcctacaagcttaagatgtttcctgttaggaaatttccccctccctggtgccagccatgaccatctatcattcctgaagaggccacctgacagtcacaatgacagtcatttgactgtctcctgacattccttggggccctatcctgccctgctcatatccacctatctacctaccctaacatattcccccctcaagagtgtgagactcaattatttggggctagtggatgaaggtcagtcctctgtggctgcttcctgctgaaataagggctgtatttgtcctctgggtctcaatctcttgctaattgtcagaacagaatggtcccatcggtaggtagaattggtgtccagccaggtccaggggaaacaggtgtatgttttcttcacatttgggtagggaggtagatattcctgtattgcagaatttctgctcctcagttcagctaaatccaggttctgtgtcacgaccaggaaaagttaggcatgcagacacgtggaagggtgaggggaatggaatttattatttattgggcgaaaaggaaaacaagaaaagaaaaactttcagcaaagtgagaggggtttctgccagcaggctcccatctcacagattggattccaagcccccacacacgagctaaagttcccaggctctttccccccaacaaggcatgaacttcctggtagctttaccccatcgtcgcagtgcacaggcgggcgggagattctccagggatcctccctcttatctgcctcctgcatctatcacctgcattattgggaacttggtttgaaattgttatatcctggagaagacaaatttatctagtaggttaaaaggcaggggccaaaaagaagtagacgtatggagacagctggttcgagcaggggaggaaccatgtgagcaatgggagagcagattttacagagttccagatggaatctgctgagggattttctttcccagagtcatgaagccacttagcgtggtcacagattctctttatatgttcctctacttgcccactattgttgacacaagtgcaatagggtttattgatgacagcacagacgactctgttctgcaaggaggtaatctagagctagtctgttgtccatgactgcattagctactgaattcagtgaagccttgagtttagagattctgttcccagttctctgacctaggtctccaatttgtgtagagaggttttggagggtgactttatgataactgaatcctctgtatggggcagctaatcctatggcagcccctagccctaccattataaggccaagagctctccttttttaagaatttgtaatgttatagatggttacacctgttccttgtggccccaggagtcctagggcacatcccctgtatgttgggtgttatctatgcagataaaaaggtttacaagtgagggggttgaataagttcttttagaacttccctcacagggcagtttattttgtttaggtccatataaaaatacatagcctggaggggtgtaggcccactcgggaatgttggttttgaaccaagtgtaagcataagcaatcccaccatgaataagatccagagtactggggctaccttatgctgagctagcattagtttgaaagaaaagaaggcattacttataatttcattgaaagagatattatagatcttccaatgactcacaggaatactcaggtgctggtcctattgttgattgttcagaagcctctcaaggttttatttaggaatgatgtatccaactagaggtgccaggaactttgatagctgttgcagtggaaaggaaaacagtaaaagggcctttccatgaggggattagttgagattttgtagatccatcactttaggttttaataaggacctgggtgggtacacaagttggttgttagagggtctggagccagcagtactctctgtatatatatttggttctaggtatgaaattctctgtcttggatttggatactttgtaccttacattttgctaggaagkttaaggtttgtactgcatattgttgtgcaagctttatggagggggagcagatgagtaagccatctacatacagcagaagttgtccccactcaagatatagcttggttagatttctttgctgggtcttgtccaaataagtgtggggcatctctaaaaccctgaggtaggactgctggctttcctgggagaaactgggatattagggggaaatatcagtccagatgttgggtaaatattaagtggatacccattttggaaagtatattcctactcaaaagcagtgtgaggcatttagacattgccagggactagtgggagaatagtaattagtcccataagcaatataaataaaggggatgtgaatctttagaggaaggggttgctacttgctcctgttacccaacagaatttgggggtaagttgcctagagaaaaaggttagcacaaagtaggcagttcttgtatttaaaaggatatttatagcactacctgtcatttccagagtttcccttggctctgttcctttaatgatgatgtctgatttggaagctggccagagtggagggccccttcagctcaaggccattattggatgggggttcaactgggggaccttttggatcccagggcagtccctcttccagtgggacttatctccagcttatcacaaagagggcaggctgtgtggggcttcctcccatttggcccatttggaaaattccttctccagtagcctggtcttctgcatcagtggcagttacctggaggagggtccttaggagaccctggagggggctggtgggcttgtaaagcagccaatagttgagcctgcatcttgtccctgcatttctccttttccttagccctgtcctccttgtccagatctcagttataaaagactgaggaggctaatttgaggatttgtggcataggggcactgggttctaaggctgacttttgtaaattttcctaatgtctggagcagcttgggtaaattgtcctttaggactagtccctcaggagattctgggtttaagtttggtgtgcttaataagtttcctgtagacttttcagaaaggctataggatttccatttggcccctggtttatggtggctaattattgtagtttagaggcttgatcttacttcattttattacctctattagacacaagagcctatggttcctggcccatattcccgctttggcattgtagtcctgattggggtccagctggggaacagctgtagcccctccagggtagttggcattttccaggtgtaagtcatttcgacagtggattgctgctccgcagatggtctgtctttcctcttgtaaaagggcttgtcccaggagtacatttatgtccttccaaattaatctaaatgtaagagccaatttggggaagccctctatgagccttttggggtcatctgagaacttttttaggtttttcctaagttgtcaaaagtcgtacatggaaaaggggatctggacctggacgagttcagttggctcacttacctcctacaagcttggagaggagaactaaggagcccggtgtaaagtggggccaattccaaaggtctgggagtgggataaatagggggaggatccaggggtggctgtttctccctctttcacctccaaaggaggaggtagtttttccttttggcttctggaggaagaaatgttggagaggaatcagcagaggagtctccagggccgatgcagggccctggaggagatggctaagcatagctaggatgtgaggtttgccttacaagctttacgaggattagggtcttccctttaggccataaaggtttgtaaataggggacctctggctttttgccctgataatggcagaaaaggtctagccggagaatggtattaaaatttgtacttccattctctagccagacttcctctgcaatgaaaaattagttttttcattttagggtttggtggttggatttatcgcagattttaaggatgcatccaaggggtcagtcccagagtatggagacaccgttatctatctgcaagacagaacagggaagagtaaggaagaggaaagagtcccttcttcttcatcttttttctttttctgtttttttttttttttttttttttttttgagacagagtctctctctgttgctcagctggagtgcagtggtgcaatctcagctcattgcaacctctacttcctgggttcaagtgatgcttgtgcctcagccttccgaggagctgggactacagatgcataccaccaagcccagctaatttttgtatttttagtagagacggggttttgtcctgaactcaggtgatccacccgccttggcctcataaagtgctggaattataagcatgagccaccacgcccagctgaaagcattccttcctgatccccttataccttggatcagagtagtgagtagggcatcccccattcatcctggagttctggaataaaccagtgattaccaggtaccactaaccctggtcccacatttccctccaggaccagccttcatctctctgctaatggtaatctgtcctgcacctgtggcctctggctgacctgtacctttgacactgtgatcttacagtgacctttgtttggagcattccagcaatgaaatggttttcctttctctcaaattcccattctccatatccctttaggtaggtgaggatcttatccctagccagcagctgtaagggaactgggccttcctttctctggacatagcactgtaggtcccagtatatgttaagaatgtagatggtcagaggaacagaggaaaacctgcatctgagtccccttgtcatccctcctgtggattcctggggaagcatggaaaacaagtatttaaaatgacaggacaatccatctgccacccgtgggaatggtagaaaataagggatattcatggaaggctgcttttgtacagtctcacaaacagcagcccttagacctaagaggacattgcctatcagtcttctcagtgtagaggaagaactgtcagggccagggagtttgggatgagagaccacaaaaggcagagaaagaattgtcctctccccaaagtgcagatagctctagaaaggaagtaggagttgctcttaatggaccacatacagatgccctatggagacaaacaaatgacctcaagagccactggaaaacctggtctcaatgtgtagcaggatttaaaaattcatgataggaaataaagaattggtggagacagagtcttcccaatattaagcagagaaagaagttgcatgatatgcagaatagaagcagggaagaggttgacttgcccccaagacagacagtgtggccagcatataaggccatctcaaagtccacagaaaaaaaggaagcataatagggtgtagacttattggggaaaagtccactttggttaaggaaatgaaggtctccagtctttgaatggcctaggctcaagccctatcacccttgtgagccacctgtccaaaagggccacagtgacttaggtctactcagtacagactctgaagtcctccacctctgctgtcgcccaccaggatgaactgaggaatctgctagagggaagagtgaccaaagagaatttttctggagatgggctggtgagtgagacagcaagagaaagaagacctcacgtaagcagagttgggtgcctccagccaaagatggcaaggcacagagggtcttaccgagaagctgcaatctgattcatgacaccaaaatgttactggcagcgggtttgggcaggatacacagtctttggttcttattgtctgagaagaaaaaatacatccaagagacagaagtagatttaagatggcagacaggaggcaggactagattgcagctctggacagagcagcatgtggaggctcgcattgtgaattatagctccagattgactgcaagaacaaaccagcaaccttgagaggacccacacaccctctgaaggaagcagactgctcttgcaggacctgggaaacaccccaaatactgtgagtaccccaactgtggaagtgggaaagggagaccctcctctcctgaacacacacccccactggagaagctgaaggtctgtttgcaagagaagtttctgactttacctggagctgagtcaatgtggagagctgagtgaaatacagaggcaaagaaagtagcagaaaggccctggaagctctctgagtcccctagcaggccatccatgcctggcatcacagggatccatccagagggcagccagagccagaggtgcaaggggtaaaactctacagggagaagaaaatctctagctgaagtttgtaacaatttgaatggggtgagaagcctcctggccagaactcaggggagggcacacatctggcgtgcagactccacaggtggagtagaaccaatccctttcattcacagctgggaggtgggtagcctggggcagattttcaagctcatcttgccctccaactgaaaatggactcaggctgttagagggtgggagacacagtgagagtgagactagccatttggtttgggtttgcgtggaagcagagtgaggcctgtgactgctggctttcccccacttccctgacaacctgcatgactcagcagaggaagccataatcctcctaggtgcacaactccagtgacctgggaatctcacccccatcccccatagcagccctagcaagactcacccaaggagagtctgagctcagacacacctagccttgcccccacctgatggtccttccctatctaccctgggagtggaagacaaagggcatataatcttgggagttctagggttcctccccatactaccacagctgatgctctctggaaggcaacacctcctggcaggagaccagccagcacaaaaatagagcattaaaccacgaaagctaagaacccccacagagcccattgcgccccccaacccctaccccctgcaccagaacaggcactggtaacctataaaggaaaatctgtgagattaacagcagatttctcagcagaaagcctacaagctagaagggactggggccctatcttcagcctcctcaaacaaaacaattatcagccaagaattttgtacccagtgaaattaagcatcatatatgaaggaaagatacagtctttttcagaaaaacaaatgctgagaaaatttgccattaccaagccaccactacaagaactgctagaaggagctctaaatcttgaaacaaatcctggaaacacaacaaaacagaacctcttttttttttaaattattattattatactttaagttttagggtacatgtgccatgccggtgtgctgcacccattaactcgtcatttagcattaggtatatctcctaatgctatccctcccccttccccccaccccacaacagtccccagagtgtgatgttccccttcctgtgtccatgtgttctcattgttcaattcccacctatgagtgagaacatgcggtgtttggttttttgttcttgcgatagtttactgagaatgatgatttccaatttcatccatgtccctacaaaggacatgaactcatcattttttatggctgcatagctttccatggtgtatatgtgccacattttcttaatccagtctatcattgttggacatttggattggttccaagtctttgctattgtgaatagtgccgcaataaacatacgtgtgcatgtgtctttatagcagcatgatttatagtcctttgggtatatacccggtaatgggatggctgggtcaaatggtatttctagttctagatccctgaggaatcgccacactgacttccacaatggttgaactagttgacagtcccaccaacagtgtaaaagtattcctatttctccacatcctctccagcacctgttgtttcctgacttttgaatgattgccattctaactgatgtgagatggtatctcattgtggttttgatttgcatttctctgatggccagtgatggtgagcattttttcatgtgttttttggctgcataaatgtcttcttttgagaagtgtctgttcatatccttcgcccactttctgatggggttgtttgtttttttcttgtgaatttgtttgagttcattgtagattctggatgttagccctttgtcagatgagtaggttgcgaaaattttctcccattttgtaggttgcctgttcactctgatggtagtttcttttgctgtgcagaagctctttagtttaattagatcccatttatcaattttggcttttgttgccattgcttttggtgttttagacgtgaagtccttgcccatgcctgtgtcctgaatggtaatgcctgggttttcttctagggtttttatggttttaggtctaacatgtaagtctttaatccatcttgaattaatttttgtataaggtgtaaggaagggatccagtttcagctttctaaatatggctagccagttttcccagaaccgtttattaaatagggaatcctttccccattgcttgtttttctcaggtttgtcaaagatcagatagttgtagatatgcggcattatttctgagggctctgttctgttccattgatctatatctctgttttggtaccagtaccatgctgttttggttactgtagccttgtagtatagtttgaagtcaggtagcgtgatgcctccagctttgttcttttggcttaggtttgacttggtgatgcaggctcttttttggttccatatgaactttaaagtagttttttccaattctgtgaagaaagtcatgggtagcttgatggggatggcattgaatctttaaattaccttgggcaatacggccattttcacgatattgattcttcctacccatgagcatggaatgttcttccatttgtttgtatcctcttttatttcattgagcagtggtttgcagttctccttgaagaagtccttcatgttgcttgtaagttggattcataggtattttattctctttgaagcaattgtgaatgggagtttactgatgatttggctctctgtttgtctgttattggtgtataagaatgcttgtgatttttgcacagaacctctttaaagcgtaaatcacaaaggacctgtaaaacaaaaatacaagctaaaaagcgaaaacaaaacaaaacaaaagtatacaggcaacaaagagcatgatgaatgcaatggtacctcacatttcgatactgacattgaatgtaaatggcctaaatgctccacttaaaagatgcagaactgcagaatggataagaactcaccaaccaactatctgctgccttcaggagactcacctaacacataaggaccaacataaacttaaagtaaaggggtggaaaagactttccatgcaaatggacaccaaaagccagcagaggtagctattcttgtgtcacacaaaacaaactttaaagcaatagcagttaaaagagacaaagagggatattatataatggtaaaaggccttctccaacaggaatatgtcacaatgctaaacatatattcacttaacaatggagcccccaaatttataaaacaattactaacagacctaagaaatgagatagacagcaacacaacaatagtgggggacttcagtacttcactgacagcactagacaggtcatcaagacaaaaagtcaacaaagaaacaatggatttaaactgtaccttggaacaaatggacttaacagatatatacagaacaactgcaaaatatacattctattcaacagtgcatggaactttctccaagatagaccatatgataggccataaaatgagccttagtgaatttaagaaaattgaattatatcaagcactctgtcagaccacagtggaataaaactggaaatcaactccaaatggaatcttcaaaaccatgcaaatacatggaaattaaataacctgctcctgaatgagcattgtgtcaaaaatgaaatcaagatggaaattatacaattatttgaactgaacaacaataatgacacaacttatcaaaacctctgggatacagcaaaggtggtgctaagaggaaagttcatagccctaaatgcctacatcaaaaagactgaaagagcaaaaaagacaatctacagtcacacctcagggatctagaaacaagaacaaaccaaacccaaacccagcagaagaaaggaaataatcaagatcagagcagaactaaatgaaattgaaacaaaaaaaaaccatacaaaaaaataaataaataaatgaaacaaaacctggttctttgagaaaataaataaaattgatagaccattagcaagattaaccaagaaaagaagagagaaaatccaaataacttcactaagaaatgaaacaggagatattacaactgacaccactgaaatacaaaagatattcaaggctactatgaacacctttatgcacataaactagaaaacctagaagagatggataaattcctggaaaaatacaacactcctagcttaaatcaggaagaattagatacactgaacagatcaataacaagcagagagattgaaatggtacttaaaaaattatcaacaaaaagaagtccaagacccgacagattcacagcagcattctaccagacattcaaagaattggtaccaatccttttgacactattccacaagatagagaaagaaggaaccttccctaattcgttctatgaagccagcatcaccctagtaccaaaaccaggaaaggacataaccaaaaaagaaaactacagatcaatatccttgataaacatagatggtaaaatccttaacaaaatactagctgactgaatccaacaacatatcaaaaagataatccaccatgatcaagtgggtttcataccaggggtgcagagatggtttaatgtacacaagtcaataaatgtgatacaccacataaacagaattaaaaacaaaaattccatgatcatctcaatagatgcagaaaaagcattcaacaaaatccagcatccctttatgattaaagctctcagcaaaatcagcatacaagggacatacattaatgtaataaaaactatctatgacaaacccacagccaacgtaatactgaatggggaaaagttgaaagaattccctctgagaactggaacaagacaatgatgcccactctcaccactcttcttcaacatagtaatggaagtcctagcaagagcaatcagacaagagggagaaataaagggcatccaaatcggtaaagaggaagtcaaactgtcactgtttgctgatgatatgattatttaccttgaaaactctaagaactcctccagcaagctcctagaactgataaatgaattcaagaaagtttctggatacaagattaatgtacacaaatcagtagctcttctatataccaacagtgaccaaggggagaatcaaatcaagaactcaacccattttacaatagctgtaaaaaaaataaaataaaatacttaagaatatacctaacaaaggagtcgagagacttctacaaggaaaactacaaaacactgctgaaaggaatcatagacaatacaaacaaatgggaacacatcccgtgatcatggatgggtagaatcaatattgtgaaaatgcccatactgccaaaagcaacctacaaattcaacacaatccccatcaaaataacaccatcattcttcacagaattagaaaaaacaattctaaaactcagatggaaccaaaaaagagcctgcatagccaaagcaagaccaagcaaaaagtacaaatctggaggcatcacactacctgatttcaaattatactataaggccatagtcaccaaaatggcatggtactggtataaaaatagacatatagaccaatggaacagaatagagaacccggagataaacccaaatacttacagccaactgatcttcaacaaagcaaacaaaaacataaagtggggaaaaggataaccttttcaacaaatggtgctgagataattggctagccacacataggagaatgaaactagatcctatctctcaccgtatacaaaaatcaactcaagatggattaagggcttaaacctaagacgtgaaactatgaaattttagaagataactttggaaaaacccttctagacattggcttaggcaaggatttcatgaccaagaacccaaaagcaaatgcaataaaaacaaagataaatagctgggacctcattaaactttacgagcttttgcagggcaaaaggaacagtcagcagagtaaacagacaacccacagagtgggagaaaaatcttcacaatctatacctctgacaaagggtagtatccagaatctacaaggaccccaaacaaatcagtaagaaaaaaacaaacaatcccatcaaaaagtaggctaagggcatgagtaggcaattcacaaaagaagatatacaaatggcaagcaaacatatgaaaaaatgctcaacatcactaatgatcaaggaaatgcaaatcaaaaacacaaaatgtgataccaccgtacttctgcaagaatggccataataaaaaaattttaaaaaacagtagatgttggcatggaaggggtgatcaggaaacacttctacactgctggtgggaatgcaaactagtacagccattatgggaaacagtgtggggattccttaaagaactaaaagtagaactaccacttgatccagcagtcccactactaggtatctacccagaggaaaagaagtcattatttgaaaaagacacttgtacacgtatgtttatagcagcacaattcacaattgcaaaactgtggaactaacccaaatgtccatcagtcaataagtggataaagaaactgtggtgtacagatatatatacaatgaaatactacacagctatgaaaaggaatgaattaacagcatttgcagtgacctggatgagattggagactattattctaagtgaagtaactcaggaatagaaaagcaaacatcatatgttctcactgatatgtgggatctaagctatgaggacacaaagatataagaatgatacaatggactttggggacttggggggaagagtgggaggggggtgagggataaaagattacaaatatggtgcagtgtatactgcttgggtgatgggtgcaccaaaatctcacaaatcaccactaaagaacttacttatataactaaatataccacctgtaccctaataacttatggaaaaaaattttataaaaagtaatagatttaagtcagaagtttattgaagcaaagtaaagtacattcggaagggaccaagtggaaaatttaaaagattgagtgccccgcttgatcattggttcaaggcttttatagagttactgtatcctgattcttcctgatctcctcccctcatccttcttgggggaactgttggctaatccttgcatgcgcagtaacttgctaatatctgtcaggggctgcatgtgccgtttggtggctgaagttgtgtgtatgctctccatgacaatttttcgttactggtctagtgcccccaaaggaaggtcacatatcaggcaaactctgacgttttgccccttcttgagcatgcctggacatatccccgaaggaaggccaaactccgccattttgccccttactgcagatgcctggtcatgtttgcttagttcctgggatcttatgaggaagttgttgctcataagctcaagatgtttcctgtttgggaggaaattttccccttcttggtgccagccatgaccatctgtcattcccaaggaggcccctgacaattgcatgacagtcacctgactgttgcctgacattccttggggcactctcctaccctgctcatatctgcctatctgcctaagtaacatgaagacattttaaaccttctcagtggttctcccatttcttctctctctctctcccccactttcccttcaaaccacctcaaaactcctttctatttctactcagcaaaatggagattaaaacctcactaaaatgtgtctttgcccacccctgccttcccatttcacagcgcacttctttcttcaaacagatttagatttacagaggaaaaaaggcagaaattctctttaccggcttcagacacttaaagaaaatctgtccttttcatctctacacgttaaaatatttgctataataagtgtagattcaagagccatttggacatatctggcttttaaatagtgttgactaatgaccaacttaacttagatctttgaatctatgtgtggtgttatgatatatattagttttcatctgaggtctagctcataactcccacagcccttgttacagtcttttgttataatgttgggtgtgttaggcctcaggggcaggcccctgaccttctccttctctcctttcacctgttcctgcctttctgattgtggcttttaagaccttccccagagagagtactgccctataccctgggggaaggaatgctgatgtcatgaagcctccataaaatcccagaaggacagggttcagtgagcttccacatagctgaacacttggactttcatggaggttggcacagccaggtaaggcatggaagctccacaccccttcccccatacctcaccctatatgcatctcttaatcggtaacatttgcaatatcctttataataaactagcaaacataagtaagtgttcccctgggttctgtgagccactccagcaaattaattgaacccaaagagaggattatgagtatgccaacttggaggtggccggttagaagctccagaggcccacacttgtgactggtgtggtggggggcagtcttgggaactgaaccttcaaccggtgggatctgacattatctccaggtagacagcgttggaactgaattacaggacacccagctagtgttggctgcttggtgtgggggggaaacctcacatgtttgttcgtagaaggcttcatctgtgttgatgatttttgtggtgtgagagtagaggaaaaatgccatcagggagagttttctctacaccctatagctcctagatgctttttatttaagacattcaaaccttgtgaaaaacaaacaaacacaaaaatctttttatttaagacggtcaaaccttgttcaaaacagcacagacattaactcggaatttaggatttattattgattaattgacattatcttcagtctgttcatattattaagtgatataagtcaggtacacacacacatgtatggggagtgtgtgggagtgtctgcatgaagtatactgtcagaaaatatactcatttcaaagaaacactgatttaggccctggcaaataaggaaacatttctatttcttctagaaataacacattcatttgccaacatctgatctatccatatgacctcttaatacacacatgaaataataaagtgtatttttcattcatttaataagcatgtgattcacgtgacactgtaagccttttttttttttttttttttttttttgagacagaccctttttctgtcgcccaggctggagtgcagtggtgtgatctctgctcactgcaacctccacctcctgagttcaagcgattctcctgcctcagcctcccaagtagccgggactacaggcacgggacaccacgcctggctaatttttttgtattttttgtagagacagggtttcgccatgttggccagactggtctgaaactcctgacctcaggtgatctgcccacctcggcctcccaaagtgctgggattaaaggcgtgagccactgcgcctgggcgagcatttttttttattccagtgtttctcgttaatctaccccatggcgttttatttcaggttgtatgtatgccagagatgaaaaaaggcaaatgacagaagagcaagtatatggagaaagataggagggacttgagaaaacttggcaatttactaaaatgaaatggcattgtttccatatttaccaaaaacagacaaacaaacctaatcattcctctcattttgatcagctttcatgtatattttctaggcctaatcaaaatcttctttggtgtcacaaaataatggaagagacatgtattggtttaggctcctgcagcagtagaccccaatataaggaatattagttgtttatttaggaaattcaagaaacctaagtaaaggagtagggaagtgagacaggaaatggaaggatctctgaaaaaatacacatcatcaagtccgttcccacagagggaaacaggagctcagtccccattgttgggttctggaagacagtgtggaacagaccccagagttatcccaactgtgagatgaggaagctggggtgcttttcaccaactcttcatccatcacctgcttccgggggtcattaacaatccaccactcccaggttatttatgctcaggccaggcatgtaactgcagccagaaaatagcccttgccaagactcacaggaattaaaaaccttcaggcaaggagctactggtctttgtaataataagctttgagaggcgggtattcagaggctatgggcaccaataacttcccttatgtgagtcataaacacaaagttaattttgtttgcatgtgtatacaagtattttgaatgaatgcttctctttgttttgtgtgtttggaaaatttaaacaaaattattattgtttttgtattggtatttaaacatctgaatatgtaacatcaaagatgatattaaaaagtataaagcaaattatcacaaaatcagatgtgcagttacatgtttacttgaaattctctctagactacatttgaaataggagcttccatagggggaaatttaaattttttttacaagttgtttaattataatgtgctttaaaaacactttagcatatcataaaccttcaaaacaaaatgagtaatcatcttctgagatccatagaaaatgtttcttaaatgtcactttcaattaccacttctggagctaacttgcaaaacaattgtgtttccaccaactgaaatatgttttcaccaaatttaagataatctgtggtcagtgtgagctttgtcttgatttaggaggaggaaagcaaagttccatttatgaatactttgaaaattttcagaaattctcctaaattgtttcagcaaccaggccaaaagagaggcctggaatcccaaggtgagaggaaactttaaaagttacacttatggccaggcacggtggctcacaccgtaattccagcactttgggagactgaaatgggtggatcacttgaggccaggagttcaggaccagcctggtcaacatggtgaaaccccatctctactaaaaatacaaaaattagcctggtgtggtggtgcatacctgtaatcccagccacttggcaggctgagacatgagaatcacttgcacccaggagacagaggctgcagtgagtgagatcatcccactgcactccaacctagacaacagagtgacactctgtctcaaaaaaaaaaaaaaaaaaaaagtttcacttgtgccttggggttggctgcctgctatcatatttttgttgtgttcttctaccccaagctccagtacctcccctcacagaaatcacctctcctaccaaccccaagggaacccattccatttttattagagagttcttctttacatggcctcaagtcttttcatcaagatttactgatagaataacagtaaatccacattactccaggtgtctctttgcccttacctagcctttgtgtctatgccattcttctcaaggaaattgccttcctttatcagctttaaaagtccatatttgggatcccctctcctggaaacattctctgactatccagcccagataattttttttctctgctttctcattataacattcatgatctgtgtcattcattcattcattcatttgcccaatatttcttgagtgcttcctaagttcaggcactgttctaggtactggggacataggaggatagaagccagtcaaattttgcactcactgaaactttactttagtaggtaagaatctatagtttaaaaaaaaattcacatatgaggcctgtgaagcaaataaagcaataatgtggtggttttcatggacattatgtctttcactacccgtccctctttttgttgtaaactctctaaggcaagtataacctcatctatacattagtatttatttaccacaaggacccataagtatttattgatatatcttcctaagtatgtgataatattctaaatagatagtagatttaatcattgggatttatgtgaagttggattaaatagataacatgataattacatttagtattgcatggaaggacacattttctcacttatagaagcctaaacaaatgtcacaatgttgatagattcctttataggatgttaactctgaagctgtcgtgaaaatgtgtgaactagtttcactttcaacttgatccttttggaatcatgacagattttgctagcccttaattcttctgcaatctttgttgatccctcctatttcaatctcataagacacttatctctcctccagaaagatctgaagggttaagtcacctatttatacctaattacagtgagccctgtgttggatttttaagggataaaaggaagtatcagatctcagttaacttatgtactgtctacagtgcctaacaatgacacaggatgactcagttaaggagaaaaatactccatttatcagcacagaattcttccctttaagctatcatatggtagctaaccttgcctaaccttgcgagtttaaccttgctttttacgtgcatgcacgcgtgtgtgtgtgtgtgtgtgtgtgtgttactaatttctaactgtaccagctcctgaattaatatttggcaacatcaatattccttgtataatgaagaagcatggtccaagagacttggatgtgacctctctaaacatcaacttacagctgcaaaataaggaataagttgtaattattccttatttgtaacaactaccttacagtgttgttttgaagattagaagagaatatatagatgaagtacccagtggacagtaggtattgaataaatgttagtttccttccaccttctctggcttatgtaacaaaattactcattctactagtcactcagactttagttaatcattagctaaagagtaacaatgcaggattttttttttaataaattggctaggattggttttatgcctggatggaataggcacttgccatttcatcacaattcaaaattcctcctgaaggcctgaaggcctgaaatgtttaccattggaaactaatcccactgtatggttactattatttattatatctattaacttataaaatattaaaatataaagtaaatattaccctactgatgcattagccactcaacataaatgagtttcttggagattaataaagcagtacatcagtatgtcccaaacaatggctaaaaggaaacctagtaaccaccccgaccccaaacttgttttgttaggccagtcagatttttttttttcattttgaattagcatcacgattgaaagtggaaagatctcacatataacttcacatttctctgtacaattgagaaacgttggctatgttggctctctgaatagcagctacctcctttcaaggtttgtatttacaatatttcccacccccatgagtccttattatcctgacactgaggacaaatatgagttgctgtccatcagcattccaaagctgtttttttttttgttttttttttcttacacttagcctacttcactccctaacaccaccagcctgatttctgagggggcctgaggtaggaggaggagaatggagagcactttctctgagagccgccattttaacagatcattaaagacacgatattcacatgacggttgcttactctctgatgaaaactacaaaaacagaatacacagggaaggtaatctgaaggtgatacctttttcctatgatccttggccttataaccactaatcaagcctgagggccgaagttcctgcctcatctctgcctgatgttacgaactaggcaggctagcagaggcaacaggcaacctgggcacctgaagagctacctggataacctagaagaacagtaggaggttaaagatgaggacaagtctatcaaaacaaaagcctgtcaagaccagaaagagaaagtcacacttttgactttacagtttgtgctgggctgacacaaaggcctcagttaacaccaaatacaacttccatagacttcaagtttccctcatatttttcctgggtcactattccagagttgagaaactgaactacatctaatattttattaaaataaaattgaagattattagaaaagtttattagtcaatagtaaaacgttatttggttagctttcttaaacaatggcatttatagatatctgattatcccaacaaaaatcttcaaatggttcatggacgctttgtcaagcttttgtgccacctgagagaaaaaaagataaatggggaggtataatgttaattttgtagcctttgcttaatgtttatttttgaaatgcctatcattttctatcagtatctgaaactccatggatttctattagccttcaccaataattacatttgaaagcatccagaagagacaatccttaccacagtctcttttaaactcttaatggctgtcacaaaattctatttttcattttctctaagagcattctattaaactgttcctagttattagctttcataaaggcacacagaaaatgtttcctctacagccacaaatattcctaaagcagaatcatagtaaaacagctgtgataatgttttattcattccagaatcctaatgattgaacaaaagagagacagtcttaagagttaacatctattgagtccgtgactgcgtgcattgttctttcaagtattttacctgcactatttaatgtaattctcccagccactctgatttcactcattttacaattgaggagactgaggcatagaaaactaaagcaatttggctggagtaagggccaggttgggacttataccttggcggtctgcctacaaggtgttcctcaccaccatctgacactgctttctctgtgtagcccagagtgtcagcctcagtgcttcaacttgagctttcaggatctatttaaagatggaaaatatagttacattatgtcaccatttgagatgcagaaagacagggccaccattttgcacaattctgaaagcacaattcatgctgtggtttgtaaaaatggtactccctagagttgggcaatggacagctcacacagagatgcagtggccctgctaaactaatgccttacataaaagagttttactcttcattcccttaaatgattcttagtaacactggctgacacacacacaaaacagtttctaagtaggtctgtccgcatactatgatcactggtcaacattaagtttccacaattaattttacataatccaaagactgccaagcagtttatctgggtaaactaaacattctgtagtcatttattctgcttccagtcatgcccagcaacaggttgagaagacaaatgttctcagaaatgatctccaaggagttgggagcaggctgcttatacgtctaattcaccagaataggtgagcgtggtcgtggtgaccttttcatactgttgcagagctgagtatgaagagatgactcacagtcctccaatgcaacacaggtgaccctgcagccagattttgccttcagtggtatgtgactcccatggggtcaggagagtatctcagacattgaaatttgacctaatggcctacctacctgcacacgcaccctgcccacttacagaagggcaagaactctgcattactgaggccttgttattattatagttcctatttaggtaagaacgcaatggagaaaaaatgcatttggttattgggcctctgtttgaatatcctgtgctttttgccaaacaatgcattctacataatcttaaaaaacaaagtccatttcaaagaacaaaaataatgaccatatccactgagcaattgagcagaatgggaatcggagttttaaactctgatatatctgttttccttagggctgaaatcttcttttcatggttctagtttctctaattgaaataagaacctaaccctgttcaaaactacatctctgggaatgagtgaaaaattaatgatcctcctattttgttggatcataataatgactctcatcctggtggggccaccagcaatgctattcttctcagactctatcttagttcctaagccactcaccaggtatttaaaagaatgatttaacacaactagaatcatttaaataactgtattttttaagaaagccatattattgctttagtttggtcattcatatatccaaaccttggactcatcatcttgcaatctcatgtgttcagttattccagagaaaacattaaggagaattgtattcttcttcccagctaaattttaggtcctcaaagctggcaaccacaatttatgctttctaaaaatcatctatgatactaagtatgagctggatcatgaataaaacccttgtaacaataaatgcttgatgacttacttcatctcattagcaagggaaggtaactcataattatcaaggtactacaggaaatagggcactatctggaaatgctaaatacatctccttgcatgaatcacttcttaccagaattccctttctttccagatcccacctccagggttctgtggtccataccaggcactacattcctcaggggctacagcctatgagcgtctcatggggctatgaaaccatttgagacctggaaaatgaagtaattgaatacaaacagaaaactgcaaaatgaggactaacatttaattaaatgttcaaagcataagattatgtcgacttcaataattgtcaaatgagtattcttaacattttactaaattaaaaaaacttatgtgctgagttttttattttacaagtatctccaagtatgctggatgattgcaaagaaaatcaaggccagtcattggttaaatgagtttaatagtagccacataatttcaaaagcaaaattataaagacccttcccagactgttgatagcaaaaataatctacgttgtggaaagtgggtccatgttaatatgttagatataagtagtgaggcctaaaaaggtattaaaacatctttgcttaaggtactacctatttgcaagattgttattttaaaaatagcttatgttttaaattgttattgctttttatcactctaataagaatttatagttgctgtaagataacaagaaaaaggttaactatctgcagagatgcctgagagtcagccagggagtaacttaaatcctgcaggaatctgactcactgaagactgtcaactgaatgaaggcttaaatttcatggtcttgggtgggagaactttttcatattctttccccatatggaataacaatctgccctgaaaacagggagtattttggcatgatctctttttgcttatttgccttccattttccataaagcaacttttgccaagcaccatacttaagactcaacttttttgcaaaaatatcagacaaagcactgtctttaagaacacagagaacacactagatcccttcttctgaaaatcactgttctatgttgtttgtggatatttttttagcattcactgcatgcctggaatgaataggctgtgtttctccccaaaagagcacaaattaatatacaaggtcaggttaaatagttaagtctgctttcctatcccttatacagaagctatccattcaaaaaaaaaaaaaaaaaacttctttttactttttttaatttttaattttggtgcatacatagtaggtgtatatatttgtggaatacatacaaacatacaatgcataataatcacatcatggtaaatgggtatgcatcacctcaagcatttatcctttttttatgttacaaacaatccaattttaccctataattgcttaaaaaacatacaataaattgttaactatagtcaccctgttgtactatcaaatattagctcttattgattctatctaattacatttttttatacccgctaagtatcccacccttccctccacgctaccctacctaacctccggaaactgtcttctgctctctatctccttcgtttgttttaatttttagctcccacaaaaagggagaacatgtgaagtttgtgtttctgtgagtaacttatttcacctaacataattatctccacttccatccgtattgttgcagatgacaggacctcattcttttttatggctaaatagtactacattatatatatgcaccatattttctttatctatttgcctgttgatagaaatttagattgcttccaaatcctggctattgttaatagtgctgcaataaacatgggagtatagataactctttgatattttgactttctttcttttgggtatgtacttagcagtgggattgctagatcatatggtagctctatttttagtcttttgaggagtcttcaaactgttctccatagtggttgtactaatttacattcccatcaaaagtgtaccagggttcccttttctttacatcctcaccagcatttcttattatttgtcttttgcataaaagccattttagctggagtgagatgacatctcacaatagttttgatttgcatttctctgacgatcaatgatgttgagcaccttttcatatacttgtttaccatttttatgtcttcttttgagaaatgtgtgttcagatgttttgcctatttttaaatcagattaattttttcctgtagagttgtttgagcttcttatatattctgattattaatcccttgtcagatggatagtttgcaaatatttcctcccattatgtgggttgtctcttcactttgtcaattgttcctttgctgtgcagaagctttttaatttgatgtgatcctatttgtcccatttgtccatttttgctttggttgcctatgcttgtagggtattacttaagaaattgttacccagtccaatgttctagagactttcttcaatgttttcttttagtagtttcatagttcagagtcttagacttaagtctttcatccattttgacttgatttttgtatatggcaaaagatagaagtctagtttccttcttctgcatgtggatatccagttttcccagcaccatttattaaggagactgtcttttcccaaagtatatacttggcgcctttgttgaaaatgagttcgctgtagatgtatggattcatttctgggttcaaaactggtattccagttttgttctttttgctcgggatacctttggctattttgagtcttttatagtttcatataaattttaggattttttttctatttctgggaagaatgtccttggtatttttatagggactacattgaatctgtagattgctttgggtagtatgaacgttttaacaatattgatccttccaattcatgaatgtggaatatctttccatttttttgtgttctctttttttccattagtatttgatagttgatagatcattgtagacttttttggtttagttaaccctaggtacttaattttatttgtacctattgcaaatgggattactttctccatttctttttcagattgttcactgttggcatgtagaaatgctactaatttttgtatgtttgttttgtatcctacaactttgctgaatttatttatcagttctaatagtgttttggtggaatcttcaggtttttccaaatttaagatcatattttctgcaaatgggataatttgccttcttcctttcaaatttctttctttggtctgattgttctagcaaggacttccagtattattaatatattgaatactagtggtgaaagtgggcatccttatcttgtcccacctcttggaagaagagtcttcagttataccctattcagtatgataccagctgtgagtctgttatatatgacttttattgtgttgaggtatttccttttatacccgattttttgaggatttttatcatgaagggatgttgaattttatcaaatgcttattcagcatctgttgaaatggtcatatggtttttgtccttcctgtcttccttttagtaaaagtgattttctctggtggcgtgttttaattttttgctttttattttttgagaacctgttgtatattttttgatttgcgattaccaggaggcttgtaaataatatattgtaactcattattttaaactgataacaacttaacactgattgcataaacaaactaacaagcaaagggaaaaccaataaaaactctacattttaactttgtcccccgctttaaaactttctgttgtctttatatcttattgtattgtctgtatttcaaaaaatagttgtagttattatttttgatcagtttatcttttattctttctatttaagatatgagttgtttacatactataataacagtgttataatattctgtgtttttctgtgtatttactaatgctagtgagctttgttcctccagatgatttcttattgctcattaatatgcttttctttcagattgaagagaattctttagcatttcttacaggataggtctggtgttgatgacatccctcagcttttgtttgtttgggaaagtcttgatttctccatgtttggagaatatttttacaggatatactagcctgagataaaagtttttttccctttagcactgtgaatatgtctcctgccctataaggtttccactgagaagtctgctgccagatatattggaactccagtgtatgttttttctttattttttcttgccgcttttcagattctttcttatctttgacctttgtgagtttgagtattgaatgccttgagctagtcttctttgggttatatctgcttggtgttctataaccttattatacttgaatattgttatatttctctaggtttaggaaggtctctgttattttccctttgaataaattttctacccccatctctctttctaacttttttttaaggtcaataactcttagatttgcccttttgagactattttctaagtcttctaggaatgcctctttcttttttattattttttcttttgtcttctctttgtattttcaagtaggctgtcttcaagctcacagttctttcttctgcttgattgttttgtgctgttaagagactctgagacatttttcagtatgtcagttgcgtgttttaactccagaatttccgcttgattcttttaaattattttaatctctttgttgaatttatctgataggattctgaattccttctgtgtgttatcttgaattccattgagtttcctctgtctaaaaggtcacatatctctgtctctccaggactggtcactgatgccttatttagtttgtttggtgatgtcatgttttcctggataggctttatgcttgtggatgttcgttgttgtctgggcattgaagagttgggtatttattgtagccttgcagtctgggcttgtttgtacctgtccttcttggtgaggctttccagatgcttgaagaaacttgggtgttgtggtctgagttttgggtcactgcaggaatatctgcattagggagcactccaagcccagtaacactgtggctcttgcagaggtaccaccttagtagtcttggataatatccagagtcattctctggattaccaggcagagactcttttttctcttctcttactttctcccaaacaaacagattcagtctcagtctgtctgtctgtctgtctgtctctctctctctctctctgtgtgtgtctctgtttcctggatctgggggaggggtaacacaaatacccctgtggccaccaccactgggactgcatagggtcagacctgaagccagcatagcactgggtcttgcccaaagcctgcagtaaccactgcttggctcctgcctatgtttgctcaaggcactagggctctataatcagcaggtggtaaagccagccaggcttgtatccttcccttcaagacaactagttcctcctagtcctgggcaggtctagagatgacgtccaggagccagggcctggagtcagaaatcttaggaatctaccggtactctattctacggtgggtgagctggcacccaagtcacaagacaaagtccttcccactcttccttctcctttccacaagcagaggagtctctccctgtggccaccactgccccaggcctgcgacaagtactgtctggctactgctgatgttcattcaaggcccaggggctcttcaatcagcttgtggtgaatgctgccaggcctaggaatctattttggggcagtgggcccacctgtaagccagggaaggtccagaaataccatctaaagccaagccctggaatcaggaacccctagaacccctttggtgctttaccctgctgtggctaagctggtacctaagctgatttttggttcttatgaaggtgcatgaaggtgcttttttgtgtggagagttgttcaatttgttgttcctttgggaggctgctatttagccatatggctccacctccctctccatccaaaaagaaaactttaaatgaaaatatacatccaaagaaagtgtttttgaaataaaaaataaatggtcttaattccaaggaaagaaccaacatagtaaagtaaaaatgcattttttccaaaagttacttgtttgatcacatattgtattttattttaatgaaatatctagaataggtaagtccatagagaatacaaaacaggttagtagttgccagggaatgtgagtgtgcagaatgaggagtcattgcttaatggcactgttttcaagagttacttttgagtacacttgcagtctggtatctaaataattgaaatatttgaaagtcgtgattcctagaataaaaacagtgactaacttttaatgatttcaatgtcatgtgcacaaaaaaaccatgtccagagtaataagtttacccattctaccattcttttcaaagaattgcttaaataagttttaaaaaatttcctattgagatgttacttaaaatacgatttgtttagttctcaaggttatgctttccccaggttatgcttcatttgggtaatctaagtttaagtcctaatgtaagacctagggcatggtacttaacttcctgtagacctcagttttcttgactgtgtggtggaagaaataatagtacctagcttgtgagtttgttttaaatgttaaatgagagaacatgtggaacatcttacccagtgcctggcacatggtgagcaatcaataaatgggagttcatcctgtcatcttcagatttctcttctggagccagccaggcttgagttctgacctggttcatccactgaacttgtaggggaagcacttagtgcccttcggtcctctcatccagtacatggatatacagtcttcatgtggttgatacaaatacgaatgtgctaatgcatctttaccaaaaagagaggtaaaagaaaggaaggataatcctgccagagatacatatgcaaagatctgaaagtaatcgagagtgaggggttgcagattggacaacacttagtagtggctccagataaggttcttaaagactggccaggatgcagccttttcatccagagaaacagccatctcattcatagacagtggtgactgattggcagattttataagatgacacaaacaccctccccattgtcctgccaaaatgtggggaaactcttcctggaaaagttatttctttgaattgagcttccaaaaggttcctattagaattcaaatactctgtctgggttgaatatcacattgcataatagtttctccagattaaggccatttttcctaaatatttaacaaaaaatttttcgcttcttatcaatgatgctggcgttggttcagtgcctgcataagacttcttccagtgtatttctttaccctggcaaccagttcctttttctttgggagaattttttttttaattataacactattgtaggaactcctttttggcacagaaggcatctaaagtaacttttagagatagaggcttatgaaaaacaagaaagaggcaagactcagtttttgaaatctaattccagccatgaagcaaatgccacaaaagggcacaggaagaaaatctgtaaagggcttatctaccaccgttgaccaaagatttattctgctgttaagcaaataccttgtaagccagatattgtgctaggtattctgaatacaaagatgcagaagcctcattccctgttttctttttttttttttttattatactttaagttttagggtacatgtgcacattgtgcaggttagttacatatgtatacatgtgccatgctggtgcactgcacccactaacgcgtcatctagcattaggtatatctcccaatgctatccctcccccctccccccaccccaccacagtccccagagtgtgatattccccttcctgtgtccatgtgatctcattgttcaattcccacctatgagtgagaatatgcggtgtttggttttttgttcttgcgatagtttactgagaatgatggtttccaatttcatccatgtccctacaaaggacatgaactcatcattttttatggctgcatagtattccatggtgtatatgtgccacattttcttaatccagtctatcattgttggacatttgggttggttccaagtctttgctattgtgaataatgccgcaataaacatacatgtgcatgtgtctttatagcagcatgatttatagtcatttgggtatatacccagtaatgggatggctgggtcaaatggtatttctagttctagatccctgaggaatcgccacactgacttccacaatggttgaactagtttacagtcccaccaacagtgtaaaagtgttcctatttctccacatcctctccagcacctgttgtttcctgactttttaatgattgccattctaactggtgtgagatgatatctcatagtggttttgatttgcatttctctgatgaacagacacttctcaaaagaagacatttatgcagccaaaaaacacatgaaaaaatgctcatcatcattccctgttttcaaagaaactcacagcattatggaggcccaggtttctatttgggcctccataatgccttgtgctctaccaagaatggtaaaacaatcctttccagtaggagttcctagttagtggcttatagttaaccaaatgaagagaggatgaccatatggtgctgataaattgaaagaaattaggatgaacatctagagatttgcatggccagacacctaattcagattgcagagcagcaggatgggaggcgtagtcctgatttaactcttgatcaaaaagaggggtaaaagaaaagaaagataatcctgccagaaatgcgtgtgcaaagatctgaaagtgatcaagagcaagggattgcagattggacagcatgttttctcatttaatcccagaggaaccctgggaggattctaggtgtgcatattgtccttattttgtagaagaaggtactgaatcttaaagagataatgtgttttcaaagcttacagagtccaaatcgatagctaaacagtgtctgtgggatttgaatccccctgtgatgttcactgtgtgttgccatatactgcaaatgtgttataaaataataattataataaacaaaattaacctgagatattcccagattgaatcaatccaaggagactgaacttctgagtttgtcttggagttagttgggctttactgctacttatgctagatcttgaaggcagagtaggaaatatacttagcagggaagtgggagaaaggtgagaggttccccaggcaggggaaacaaagtgagcagatttggggcaaggtgtgtgagattgtgtggttggcaatatagggtgggaaaaattagttatcaagggcaaagctgaatagcagattgaacccaaatggtagaagtttttatttaacacacaaaaaaggctgaaattgatcctgtaaggaatatgaagctatagaaggtttttcatcacaggctttgacattttaaggtttgtatctttgaaagataatccaaagataagagaaaaaaaccttagatgtgtaaaatagaagtcaggaaaactacacaagctatgtgtaaagggagtcaaggggacaggatccaaaggaagacaaaagcacaaaccaattattttaaatcaaatactagtgcagtaacatatatttttaagttttaaagctgcttttctccatagcttattgattactcttttaaaacttatttttaatagcagatattatttattgattccttaccattttctagatactttgctaaggttttacatgtcttttttagtcctcagaaaattctcttctatctccattttatagctgaggaaactgaagccagggaaggttaaataatttgtttgcaatcaaacaactagtgattggtggaatttggatttgcaaccaggcagtctgactccaaaggcctcttcttaacttgatcctacatacccttcctaaatagtaggcgtttttctcagagcagctgttttacattagagaaaacttatttgtaatctgtgatcaaggagaaactgcctgagttgcctggattattttggcatttttaatatgtacaagaaaaatgttatcaaataaatgtaaatttaaaggtcctgatgagagtttactttctaataaaacaattttcaacatttcccattacatcagaaactaaattattattaaaacacatcttgtgttcatttatttttgacaggctgcttttcacatctttttttttttttttttttttttttgagctggagtttcactcttgtcgcccaggttggagtccaatgacacgatctcggctcactgcaacctcctcctcccaagttgaagcaattctcctgcctcagcctcccaagtagctgggattacaggtgctcgccaccacacccagctaagttttgtatttttttagtagagacggggtttcaccatgtttgccaggctggtctcaaactcctgacctcaggtgatccacccgtctcggcctcccaaagtgctgggattataggcatgagccaccgcgcgcagcctccaatcttattttaatgaaaatctcaatttatctcagtgttagaaactagggcttcatttggcaatgtggtctttccagttgtttcatctctttcaaaagtcttttaagaattattgaagtaagttaattttaaatttttgctttatcccttgagattggtatatagagttaggaactacttgattaaatacaggaagctactataaatttgaaataagaactaaagttataatgtgaccagactgggtaagcactgataacatttgtatatatttaaacagaaaaaaaatagttagaagaataatttttaaaaacacacaccagatgttggtaaaggcaaagatatttttgctcttgactttgtctatgaaagtcaagtgaatactttgaaagaattgatgatggataaggcaagtacattgatttctcaaggtgtgaattgttatcttcaaactttgtgcttccataattgttttttctttaataatgagacatctagaccataactggctatgtgattctgaatctacctttacaacttaatctttgtgattcccctatataagatatctagagtagtcaaattcatacggacagaaagccaaatggtgcttgtcaggggctgggagaagaggagaataggaagttactattaatgagtacagggttgtcgatttggaaggatgaaaaagttctggagatggatggagataatcgttgtgcaacagggggaatatacattacaccactgatcagtatacttagaaagggttaaaatgtcaattttacgtgatgtgtattttaccataataaaaaatacttaatatttacctatgcttagagagagttgacatatagtcatttgataaataaaatttgtaaatgcgtatgcttagataaacatagaaaattgttttaaagtagaacttatagatttctagctttaaaactgtggagaaacaatcttcctatgccatttttttctttaaaaagtcactcaaaccaataattagtacaaaaaacagaaaggtacatttcatctttgaggaaactgggagatgtctgtgactctaagccacaatacataaagatagaagtaggaagagaaaaggtcaatgacttaaccaaatcagagaacaatactaaagtgaagcaaactgagctgccccagtcgcccaaaacatactttggaagatggaagagttctaaatatagcaggtgtatgaacatgtatattatatacacttctccataagccctcactctttttcagtgtagtcaacatattttgcatccctctccatggaagacagagactttgggatactaagcaaagagtaggagaaggatggctgtatgtttaactttatttaggacaattaaatgaatgtctgcaatgtgtcagtaagaccttcagcgtccttctcctacccacaccagaatgctaggaagcatatttatatccttctctagaaaaatagagataccccagaggaaaaaatctcttacaaatagtaacatttggaagaggcaaaaaaaatccccactgggcacttgatgatactgcagtaaaactcccagtacacaagcctcacccatgcacttagaacttactgtcacctttctagggtctcattcttgtgtatgaattgggatcaggaatcaatgctggagtttgaggatattacactcattgctctttgtttacattatttacatgtatttctttaataaaatttaaatatttaattcaaaataatgttaaatttgcagagattcatttaagtttagaataaagaagaacaagaaatgtgaaagagggacaagaggagaggcagaatgcaaaggaaatacagcagcacttagaaaattttaaattagatagtttttcttctgaaatccagtattgaattagtgcaaaattctgaaagtcaattacaaaattcattttatgtcaacattactgactccatgcacaaatgtttattctagttttaaaaactagtattctgtaccttttaatagccaatgtaatttgttgacaaatattgaaatttatacgttaccagaggtctcacgtattgttaccttttaaaatgatcatttattaaccagtattgcctaatgaggcaatcaaaatgtcatctgttgcataggtaacaggaaactaccattactcatgttgtgagatggtcaaagaccttatcatattttatggctaacaaactcatgatgttgtcatatatgccctcatcacagtgtttatgatacctaaaagttagtgcctaaaaattagaaacaaggacagtgaagttagattgtttaatcctgcatatcttaaagatctaacattttctagctgttaaatatgtttatcattatactagtaatgtacgtgcaccatttttattatattaattcattgccactgtacaactaaagaggatggatgaattttaaaaacttccaaaaacttggtagcattttttaatctctttctcttcctcttttctttctgtcttccacacacacacacacacacaaacacacacatacacatacatacatgcacacatacacatcatgaagagcaagctttggaatgaaatatacctgggtccaaaaattttgaacaaattgttgactttctttatgtatgaaattattattatcacatctactttggagggatgttgtgatgtataattaagaaagtatagtctacttagcatgtaggtaattaataattagtagttattattattatcctaacctgacagtttatgaaagaggtaggaaatctgaagataggaaagccttcaaaatataatactccggacttctcctttgggaattaagaaatgtagctccaagcaaggttcatgccagtaggaaagtccttgaatccaactgtattcctagtaagtgtaataaaataaaagaaacctctagaaattgcctcaaaattcccctccagataaggaaaataacacaatatttctcaataatgaggaactgctacaggagttcagtgtcttattctcattaacgttagagtacaatagagaatagcaggaaactgtaaaaactgcagtcccctggtctttttttctaaaaagttagtttgacatatctggagtactgaatttcagcatatttgagaggcctgaatatttagttgatatataatatggctctaagaaatatgctcatgatagattggaaagtatagaatatctattgtaatctgaaaataggaatttagagaacagaagatttgatagtaggcagagtatttgaaaatagtaatacttgagaaaacctgagttgtatagtaaaattactccgtaacacctcattcagttggcttcatttaatgtttaatgtttaatccatggataaatgtcataagtctcacaagtcacgctcaccattggatgataagagaaagggagatcacattttaggtgcgcacaatctacctgtatgcaattgacgctttccatgtaagtgttgccaagttgtatcggggcaccattagtggtatgagacagactttaggagttattttggactcctttttttctattaatatatcttatattttgggggcaaattataccagtatattaaatctatttacagaataaatataaagttaccttttatattcagtttaagtttttttaaaaagtgagtcaattaagaaaaatatcaaatcatggtatagatggaatgctaatatggaaagaattatgaaggtggtgttatgactgaagtttcagaaacatcaaatgacatagtcatttgattcaacaaaacatctacagatggatgacccaatggatgtatacatctatggtacagtctattgaaatgtggtaacaaccagaaagtaaaaggtccatacattatacaattcagtacaacagggaaatactgagaaataatcgcagcttctggatcaaaagcatgggccacatggttcctaaatccagtctccccatattcaggcctcctcatcagcctgcatgccatcatatgcttgcatgctaacaggaatttcgagggaaatgccatatcttttccatttggggaagcttttcagagggaaaactacaggatgcttagataacaaaacattctttcagaaatgttcatgtgagaaatggtcttacaagtggataaaactctgtaacatcaaatacatactttttttttattctgtcactaccttaaatattaggagtagaagcaaaacttaaatttaaatctcaatggtcttacaacatagcgcatctttctttctctgtaatggcaaccttgatgtaccaatccaaaaactttgagtattctggttagttccatacattgtcagattccccacttaagtttgtttttgccaggggagagggacgatttcttagtcattatggtactattatacagtctttagtagatgcccaataagtgtgttaggttttcagagaaagattcttggaagatgtagaatgttgggcaagtaagcaaggaacagcacatggggctgcactaaacttgtgtgtgtgtgacagagaagggagtagcatcaggctaaataagctcattgtaacatggatctgggggacggtagaacacaggctaattatttctggagagttgaaaactcaacagtcagacattacattctctgatcattgtcatttgctttctgaaatggcaactggaagctatttggtagaccttacatggagggaacagtgtttcaaataaatagtagttgcctaattttacttggtttgcttttgttctttcttttcccacatttaaattccaataagaaaaaaattaaacctcttcctctaaatcccctctcccctaaaaataattagtctcacaaaacttttaagtttccaaaaaaatacatgattaattaacctgctttaaaatgccagcaatatactagacatgggacagtgctaagaaagtgtgaatgtcccctggcagtcataaggaaactgaaaagcttaaggggataactatgtggaaagcaatttattggcatttaccgtaagaggcctgagagtcattgaaagaagactaagtcacaaatgcaccttgaagtgtgaccaggggagcagatgaagggtttgttgtaagaagcagccagagcctctggcggatgccgtactacattttccaagttgtttgggtgggtcacaactgcactccaacatcctgtctgcaaatgctaaataaacaccaagttcacgtcagactagagaaccaacgtactagctaatgccatttaagcaatcagaatgcttacattattttcacttggtaattcacatccaaaataattgaagttggcacacccagaggagtatatatcctctgtgtagatgttcagagagataggcaggctggtcaactgttccttctgttgggagcaattggaatcagcttagattatatctactgtaatagaaaatattttatatttaggaggtgggaaaggttttggccttcgaaataataagagatattgacaagatataaagcttcattccttactgaagagctgttaaggattagcaaacccaagtctttgtgtgtagagatgaatgaaatttgcattttttttaaaaaaaaataaggtttagaaaacattgtgcaagggaacagccttaatacgtgcagccacttgtccaggaataatacattcaatttttcagtttaaaattccagtatgttctgatccaagggtgcctgttacactctgctgaatttttaagaggtaatttacatctctacaaccaactccaaagcatgacatttcattacatccgctcaaaatgaacagctgctaagtcatcaagttctctcaactttgcttctaaagagaaaagtttagttttagtgcttcagtgaaatacttttttgaaagaatgacttttataaaattcatttgtttattatggtaaataaacaacttaatggcaaggggtgtgttccttgtaaaggtgatcacggaatgttacccagaataacacagacatctcatttcccagagaaggaaatggttttataagttttgtgaggtctcttgtctgcttggccggtttacagtgctggtctctggagctgatccgcccctttgctttgtaagtctcagcaattgacgaggctaggctgggcgctgggcttttctttttttttttttttttttttcctttctcactgccctgcggtgttttgaactgccttcttacagacgtcatacagcccttgaggaatagtttctgcctggtgagattgaatgatagttctcattcacaaaaccctggattctaagcagggacacacagaaattactttcgcaggtaaatcagcccacccagccaaagtgtggagagatttgttccttggctgacttctttgctccacggagaggagtgttttcctgtgcttgccctgaaatggaacttccttgacagctctcccgtgttacagtacctcccggtcattttctttttctctctctctacctgcgctcttcgagtgtcagaaacctttaaagctgttactatggaattgcaaaaaagagatcaagtgactctttcactatgctggtttcccttgtgacccagatgaagaatcaattcagaattcagttcctcccttggcattgcaagacacagaagaaactgtcacttcctaacagcctagtactggagtaaattcagtatgaaggaagaaagcgctcctgcgtgttagaaccttgcccatgagctggaccgaggacaggagatggactccaggaaaattggatttcttcaagcagcctcccttggaaatggaatatctttaaaatcttctttgcagaaagacagttagaatgtattaatcagaatagttgaagacttattttcctttttattttttttcaaaatgagcattattatgaagccaagatcccgatctacaagttccctaaggactgcagaggcagtttggtaacgttcttttctctcatgcttttccccttttctcttttaagattgacgtactccttgagtatttagtaagttgtgtgatgtcgaggctttgtgaaagaaggcagtattggcggctcttttattctttattttgttcccaaactcatgtgctttaaccaaatgggtgctgattttttttttaattcctcttggactgtaacaatttatctgatgataatttttaaaggaggaaagaaacttgcagatatgttgggagttttgaaaatgaaaacttgtcatttttcagtgtttgattcagttgcttgttttcttatcttctttgcttgctgcaagcaggctggtggttgacaggctttgcccttgtctttaaaagcaataccctcacttttagcacagatgtgttagaaattaataatgttatttatatttaatcatacacatgaaacaaacttgaatttaactatgtggctaaatgtatatcaagttgcttatcattcattcatctcttatgttttattttattagaaatgattcctagtaattatatttttggttattttaatgcttttactctgatgaaaaaatatgtcagtttcaatgtattctaatgttctattatttccccaatggtgatttgatatgctaatcagcatatggcatggcccttaaggagtattttccaacaaagtaacttttttttctacaataggtatttacaaaatacttttatggctattttaggggttagtcttattttgtttttcttagtgattgattataaataactaagctcacctctttgaaatggaaataatcatacctcacactggggaaataaaagcaatgattgaagtgaggtggttgagaatgggaggaaaacaggccagcaaaatatgcattatcatgtgagcaggcaaacacacatgtaaatactcaaattatttgcgtcaggaatttagcttgtgtttttgtggataggttagcctttgctgttattgtagtgttttacagtcaaccagaaacaagaattgccccatccgcagtatttctgtgagttttaataaattatagatgaagattttgtctcttaacgttacttgccatttcttacaaaataacacgtgcaataaattattccttgagtttatttaaagaaaagattgcatctgcaaacaaatttggagagtcctgtcctttttttcctcaaacaataaatactggaaaatccttaaaatccttgtatgaattaccatagctaatataaatcaccaacatgagtaaacagaatttataatatacatgaatttaactcatttataatttataccattcctatgtgaaaagatgttactactttaaaaatagtgtttaaccaaactatttctctttttgtctaaactgccaggagatgtattttcaaattcaggtttcaattggaaataatttgttcatttcaggagatgagtaacattgacaccctttacctctctgagattatcatagtctatttttatccacaattattatattttttgttttaaattgtatgggatattttcataagtcaagccacaatttaaaatgcatttttaaatattttgatttgttaatgtgtgtatttttccatttaactaaaaatattctccatagacttggggatagaatgatttctgtgtaagaaataaatctctctctatatatgcatgattcttagatttaactacacactatagaaacctctccagttattaatcttacatctgacttaataatataaccgcttgggtatatcactgcagctgccaaaaaatttggcctgagggtataatcagctgtagtaacagttttgccattttattatccgtctatcagtcaaatattagacacatctattatatttatttatttaattacatgtataaaatcaatatagattatagatttggtatatagagaaaatatatgtttgtgtgtatatatatgtatacacatacatacacacacacatgtttacttgagcattaaaaaaacccaaacggcctctcttcttgtgcctctgcacataaaggccacaggcctcaaattgctcagagggacaatgttttctcaccagtgttgctgtctgcatttctccaccaccaccctaccctcattccttttcagttgacttcccatgagagagacctaaaactttgccatttatctctttttcagatgtttatttgtttccaggttgatctccaaaatactttgttcttgggacacatctttctggctttaccatcttcactctgattacataaatctattttgtgttccattggtctactttctccaaatctgtctactgtcctccgggattccctaaagccaaacattacgtttggaagtttgttgtattgtgcaagaatccaatgttttggattacttctttacctttttctatttgtttctctccaagtatcataaaaagcagtccacactaacttgtccttacagccttaattaaattgctatgagatattcacattttaaatgggatttcatggcaaacttgtattttatacccttcctcttattaaaggtcagcctgttataattaaaattttattaatttcaagacaaaatacaaataaccttaaaattaatctatttgtctctttgtaacataggtgtccaaatttagggtttatttaataaaggtgtatactaggttgcttttatttaaggaacagttatttatatgccacgttctagcagaaagtgattatagtatttattcttaagcattattttaaaaaaatgtgcctgcatgaaattgagaaaaactttatatattttcttatgctcataaagctaataaaattagcagattcattgattgcagaattgtttgcctttcttgcatatcttaaattcagatttagtcagttgttatatactatgaaaatattaccttacatattccttgatatctctttaacacttttataaacatttataaacatttcccagggatacttctcattaatgtaattaagacttgtgatttagtttaagtaagtaaaacattattagtcttacaaatataaatataaagagaagtttagtcaatggaagtggacttttttctttcctgctgacagaacagtgtttaggatttatgtgttacatgtaagatcattcattatgtaatctgaaaataaaagagatgctactgttcaaaatatgactgtggttgtttttaaagcaaattttaaaattggttattgtatatgtaatagtacttatacttttcattataagtattattatgtaataagtatacatgtaatacttaggtttgtagatgcagaaaaaattctggaagactctgtccaagcttttggtagtggttattttttaggagtaaaaaaaaaaatggtaggagtgaaggtaagggggactgcctctcttttcttcactgtatttgcatattgtatgtagtttttatcaataaagtattatatatgaaagtttaaaatattaaaaatatacctactatatgtattagcaagctcatctttatatatgccaatatctacttagacattaaaccacaatttgctcaggttatataatatgcaaatgagtatttcagtactggttggatacaattttctgaattttcttgcaactctgaccaatggaggattataatttttttattagctcttttctcttaaggttgtaaaaatctagactggcttagcattcttattttggcctcatgatcacagtggaaagcattcatataagctaaaatgtccaattttataattgagaatcaaaaagatggaataacattaatatgttggaaggaaaataacccattaaccccattattccatcctcagttattctcattttcaacttaccttacatatcttaaatagctgtaaatactatttctgtactctgcttcttcatttaacatatcaatatttttctatttttggccaggcggcgtagcttgctcctgtaatacctgcaatttaggaggctgaggcaggcagatcgcctgaggccaggagttcaagaccagcctggccaaaatggcgcaaccctgtctctactaaaaatccaaaaattagccagagtggtggaacatgcctgtaatctcagcttcttgggaggctgaggcatgagaattgcttcaacccaggaggtggaggttacagtgagccaagatcgtgccactgcactccagcctgggtgacagagcaagactctgtctcaatttaaaaaaaaaaaaaatccatttttctaatacttatagctttcattttattgagtgtcttatgaaagagctctatcaagaattttacatatatattatttagttcttattacaatattgaaaagaaggagttgttaatcctaattttacaggtgagaaaatgattccgtgagatgaaataacttgagcaaggtcataggctggggtaacccaagtctgtctacctcaaagaacgtgctctggttcttcagcttgttgccttcctctactgtggatataattatctttttaatggccataaaagtgttcatgttgtgaatatttctagatgcattacagtatttggcagttttcttttcggaagtatggtagcctatgaaattcagggttgacgttgttggttgttgaaaaatagctttgtgaaagactgttggttgttgaaaaatagctttgtgaaaggctcttgcagcttgtagaccattatattctctactggtagcaaataaggtcctctggtctttataacagacaataaagaacaaaaggccaatgcctcacaattttgaatagattatctttccaattctattaccaagtttttctgttctctgcaagctctgtaaggcttcaggttggaaacaagtagtacatatcagattttgtatgacatctaagatcagctttgaaaaaaatatgcaatcttccttcctatttcttctatcttagaaacttgtaaatacgcaaacaaatggaattctcatattttctgcctgtgcaatatatattatgatttggtttaggtatgtgactactgtcaaagttggttcagggttttgagcatgaggtaaactttttttggtcctattacccaagttagtgatgtatctgttatgaaatatacttaaagatatacagcttttagaaatgattaagataccttgaaatatttgatgtatttaaaacataactagaaagacacagagtggatcacagataggtttactctttaaagtcatgaagtatgagattccctggaaaaagccatttgtccactgtacttctaacatgctctgtgtccctggaggagtcacctagtccctctgaagccaagtctactgtcctgtaaaataaaaggggcaaggcaggtcaatggattttaaacacgtttatttcaatgggacattttttattaatgaaatgtgagttgaagttaatataaatgaatatttatactgtaatttttagatataaaatcatatataaattcaatatatagatataatttttaaaaacatagatatgtgtgaaatatataagtaaaaagtataagcacacataaaacaataaaacagccactgagtttgtacatttaccccccaccccaaattcaaaccctctccttaaaatacctctaaagactttaggattccaaggaatattgtttgaaaaccactaagctaatgactgttaagatcacttacagttttactctctgcagtgctgccttaccgcgggagagtcatttgtgtattctgtatctctatatggattgggataaactcgtaggtaatgtagcagttcaaatacctctgccttataagaccttgaagttatgtaacttttcccacttctgagatatcacagaagagttatcactataatagttaagatctattcattttatttagcatcttattttttacaagtttattttaggctcatctggaatgagaaaatcatgcactaaacactgtatgatgcatagctgataattcaggaagtgagtatggttgttggtaaagaaatgctgaattggtatgaaattcttcagaagcaagacgcttcttttggtatttcaaaatggggttctccaccctctttttctatcatgtcaactggctgtggttatgtgtgcaataatacttagtcctgactgcaactcttttttttttcttccccacggatctgaggcacaccatggttttggccttatcattaaaacttgccttttaggagaggtaaaggaatagctcacttagtagttcctctgtcaatcattccaatcatgtagtgaattctattgaatcagaagggatgatgacatgaaggtaaccatgagtatacgaatggttagtcatggatccacccaaccattactagcaagattgagaaaagtagattctaagatgaaactgaaggggaagaatattaatgaggcctttaaggagtttttaagctttttagggaaagatgctgagcgatatgtataaatattcccaataatactaatactaaacatatagaattgtcaaagtttagataaaggtatagagaatagggcctgagggatattagctaggttggtaaggaagatagtcacaaagaaagcacagtcttaataaaaaatcaatatagattttcttggaagcctttccagaggtgatccaatatctcaaaatataatacaggggttgaaggtatattagaaaatggacagaagtaaggtatacttcagccacaagcaccaaatctctccagggattggtgcctatgggaagggctggggtaccacatggggcacaatgacagcaagcctgggtgagacactgttaaatataactgtgtacaggtaactaactaatgagagcccgtgccagtgatatgtctcagctctcaaattgcctagttctttgtcaagtttgacctaaattagaaagcatttcaaaagtatggaaagtaggaagaatgccagaacctatggatgcagttttttagcatgacaggggcaatattgtaagtatttattatctgtcctaagccttctaaggggattggctccctaatgagcatcctgggtgatggctgaggatgcgaattagagaagctaacagaagggtgaactgctcttcagaataagagttagaaaaacacaagggaatatttcaagagaagagctggggaagtgtggcaagaaaaaagagattatacagagaccaatatggaagaattccagcccagtttgaactaagcatccaccatctagcaccctaccctgtttaataacactggcaacctctgggcaaaagctgccattaatgaaactcagtgtagaggacatttgccccccatctcagccctaagaatttctgccatagggtaaagggggtcacctgcaagcccttccatttccctactacacatgaggaagaataagaaattagaaaactagaaactaggtgtagaatgtatgcacaccaaggattgcatcttccaaagtacccttataggaagcagtcctgttgttttaaacccacagagttaggaagttttctttatatctaatacaaatcttctttgcttaaattctaacccatttcctcttagttgtcagtagatataatgagagtgaatcaatagataaaccaattcttctttatggcctttgaaaactgctagtgagtgacttcttggtcttttttcatttcatattgcaaaatattcattctaaattgtaaaatagatggcaccagtgtgacttgttaaaataaatgtttcattaaacataatttcagtatgtaattgttttcagacttcctagagaaaagtgctcccgttgtatctaattctctttcttgtttaaaatacatcaaagatgagaaattgagctctttttagtgaacttgcttgagacattcatatggaatacagaaaataataattcctaacattcaggatgtcattccattgcaatgtggcacagagttttttctttgcatcaaggaatttatatgactgatactattttagtcaggataaattactgtaaaatgtgtccacttttaaccaatggcattctaacatgggataggcaacagcgggctgtgatttttgctctgatactgcaactttgttatagaatagcaagtaactgattggcagctagatcaccagctagctggagaaagcagcttctaggtctatagtcatagttggagtcataacctcattaatgatagctacaatgtattgggcatctactctttgacagacaatgaacttagtactatatacagttgaagcaactgtatgaataaactgtatgaataaaacttgaagtcgcacagcttataaaattacagtgctgcagaaaaatcttggtctgtcgaaactacatcccatatttgttgttgttgttcttattgttttgtttgcttttcctcactatctaaactgctttggctacacatagttctgtttcatggtattagaaaagtagtcaacaagctgctacttatacttttccttcctgtcctagactgttcaagtttcttcttttaatcttatgtatatcaagaacatgtttgcctatggtatttgtctgcctttccccccaagatttgtatacaagcctccaaccgtgagccctagagatatattgagaaatagaacatggactttgacacggctccattccttggagatctagctagttcctgactcgttcagcttattgactctcttcctctggtcagactataaattgcagttttccttctctctggcatttgaccagttagtagcaccataaaacctttgaaataaaagagaccacagagaataacctataatctgattttccccacccctaaccccaatgtggagctggaaacattttgctagtctttaacatttccagtcaagtagggtcaagaaaaactgttaaaaacaatgtcaatgcttaagtggtaaaaagatttgttgaagaatatatatatatatatatatttagagacagggtctcactgtgtttcccaggctgaggtacagtggctatttacaggtgtgatcatatgcactacagccttgaactcctagtctcaatcctcctgccttagccttcccagtaactgggactacaggcatacaccaccatgcctggctggagaaatatttttttaacttcaaaaatgaagtttgagctgaaaaagagagctaaaaattagtctgtcaggcaaatgtgtgaaagcagttctattataatttgtattgagctataatgtaattcctaaacttatgtcatatagctaagtaagtagctgtaattcgcatcttgaaattttaaatttacttctttcctctcaatatagtcttcatctgaattaaaaattgtggcaatttgtatttattgtgtacttaactatgtgccaggcactgtgctgttcacttgacctaattatctcattagatcctcatgatgaatcctagacagtactcattagtcttattcctcagactgaggcctaatgaagtaaagtggcttgcctaaatttgagtggcaaataagataatttcatgattcgcatattttcttaattataaaatgttacctttagcaatgatgtatatgttaatatgttcaatgagttgatctacctgaagtgcttagcacatggctggctccttgtgagtgaccaggaactgttagcttatattatgcatttttgaagtttacacattggtatgactttctaaataatcaagaactctaaatgtgaaagctgattcattttgtaagggtttcttttccataaggtagtcttttttaacacagtcagaattaagcatttatatagagctaggtattccagataaatcacgttaatagtgtgattcaaagaagacacactgctatctaggtgggtcaaagaagtaaactacttagtggaggtggcaaaataagaagtggtcagtgggaagctaaaccacctctgatttagttatttaaaactcaatgagaaccctctaaggaagcacaactaggcaggggtttcatctgaaaggaatggtcagctacctgagcattatctctaggtgcacctttgtaaagactttctccatgtatctttcctactgggtgccaccctgtggcttggtcctacggtaatcacactgccaggcattctctacctctacaaatcccttactcttctagtcctaaggtgcattcctggttgtgtaattcacagattattatctccctggagctgagcctcatcatctctatcagaccagactgagaaggactcctttttcctttgtcccgccatcccagctcagtgcagaaggcttaagatgctttctccatcatttctaaagaacaacagacaaaaatagagatctggttaggtctgttcttgtggcgtgaagtgttaggatgagctgaacagccacaggggctagaaatgtcaagaatgcaatacgttagagcaggcatttagcattcctgtctctgatatctactattttattatgagtagttaccaaaacaaaacaaaacaaactgtaaaagcattattttgttataattaacaactgcacattggattaagtgtgattgagggtggagttcaccagcttgggaaaaaaaattaaccattaaagattccctgagtgttttgctttaaaaagagatagcccaattacttttctgtgtttcgttaagagtctactagtatatgaatcagtaagagcttctagggtaatataaaacacacacaaaaaagcaaatttgatgttagcagacaactttttaaaggtattcgtgtaactgaaaaaatcattttacgtacataggaatgaaattttatgtttacctagaaatatatgtgaaatccctccattattgcaagatctttttcatgtaaatatcaaaagaattagacagtctgcattgtttaaaaccaagatagctagtctttttaatctatgggcaacttgtaattacgaatagcagtagctgcctggaataatgtactgagagctgcgttggtctcagagaaaatgtgctgtgatccattggtgatctctgccagacagaagagggacatagtgtggctgcttgccatttaaatggccttgatgatctcatcataactctatatatctaatctcaccattaaatttgcatgcaaataaagtcattgtagcagaaacaggttttatgcatacatacaaatacatgtgtattttttgatatgttttgtctatttgtcacctatgaagaacatataaatattgtaaacagaaaaactctttttggatgttgcaaatgcaaagaagaaaaataagtaattctaattttcaaaggtcacccctgtaatcaccacccagattaaaaatagtaccagcagccaaaagtcacctttatgcccctttaagcccctgcccccacctactaaaaataatagtgatcctgattttgaaaatcacaaactttttaaatttcctgcttttgaattttatataaaaggaataatatagcatgtactcttttgtgtttggctgtttccctcacccccttgcaaaattatgtttgaaagatgatcccttgttgatgcggatatggttcattcattctcacttaagtataggtaattaagcaaacttttgtttgagatacaaattcagggtaaaaatcagattttctatttaaataataatttggtatatatgactatttgagcattttaaactgttgtcattttacaataattattttagtatgatttaatatccaaattctgttgcttagattcaccctcagtggacatttcttctgaagggccttcctagacttccccaattagaattaaaactctcttctctgtgctgtcatgaaaccttgtacatttctctaactcttgaaggattacaattattgtcttctgtctcacgtacctctcctgtgagcatgttttggagtagactgggtttgctcatctttgtagagcaatgaacccctgttcccagcaccatgcctgctccatcatgggcattcaacatctgtcctttgcatggaaagtagaacagtgagttcttccatattacaaagaatattacagtcaatttttatttttaattttcttttagtagatggcacttttcaggagattgtactgggtgagttgtagacacagtagttactctttatggcaagagttgtatagtatccgggaggatttttgcctcttccctgtggctttctttcacccttagtttgccaccaccactggcaattctaatctaggcacaccttccattgcctcctgtgtttcccattctaaaatatatacttccaagttttcctctatattttctgactgctcgaatgactcttctcgtgtcataaactagtaaagagtagtgcatatagaaatgctgataaatgtgttgcacatggttatcacccgactgacatgctgaccttctgactctatcaatgggtgatttttatatgaagccaagaaatctgttggtggtaagtactaagaccaccacttcaggctcactctaacctcattgtgtgcatcttgaaaccccacacagttgtcacatatgagcagattccacaggagggatgctgaaccaaagtgacaagcttgtcctggagccctaacacagggattgacccccgaccttcaaagtcagggaacaacttagggttggcttaccttcttgtattgtgaacttttccgattgtgaagccagcttttagctttaccacactcccagacttaaatatttggaatggcaagaaattaggcttaaaaaaaaagaaggaaattaaggcttaatccttaataatgaggaagtaatttgttttagtattgtacagaaacattttctagctacctgatcatttagtctagttctatagcttaaaatatatagtccttaaagaaaagttttatttctgtgggtctattagttacaaaagtaaaggtgcattttttattgctttatttaagtgtttattaagcttgttctgccacaggtaccctgctggctgttagagagacaatggtgaaatatacagcactcggcttcataaaatttatggtctagtgactttctgaagtatttctatagggcaggagacttctatttcaccttctactatatccttggaatagtttttactttcctggtaggagtgtgcatttatataagtgtttcagttgcttccagaaatccagtggtaaacaacataattttaaaacctccctacttgaatttggggtggagtaatataaaataaatctggaatatttgattttttagaccaaaatactttccctgggttagagagatattttcttttcttactggcctggaaatccatgccattttaataagagatatttttattctaggtaaattgtttacttaatcacctcctaacaaggctgtgtcagccaagttaaatatttaaatttatttttatttaaataaattttaaaaccaacagatttctttctcattttaatgaatttagcctttgagttttcaaagataaaatatacagagtagaacattttaatgtatctgtagagagggaacacaaaaagggcacatcaggaaaaaatagttggaaaaaagtgaattttatacaaaattaactcataaaatgaatataaggcattatttcacttattgccaaaatctgtctttacagataatcttcgggagacctttatttttataggccctagttaaaatattttttgaatgcttgaggctctatttcactaataagagaaataaactttttctttctataaataactgctactagcttgtttgtcagctctctaaataaactcattttactattactatgcttgagtgctgttatatattcctttgttactgtgcataatccctggctataactgcattaataagtaaggccattacatcaaatagggatctaacaaaaactttcgaatggactatcaaagaccagattcaatgcaggaaatcagaaggaaatggcatttatgtcctagtgtagttcagttaaaaggcctgcccttaaggattacaactgccataaaagggcaccatgcaagaatggaaaacctgtttacaacaaaatatcaaattattatctgactttcacaatgaaccacattattctatgactgccagtcatacatctggactactataccatttgtgtgcagttacagcagctccagttctatatggctagttttgaacttagtctgactttaaaacccatcccatttactatcctctgctttttttttttttttggtgtatattgtgggaaattccataaatgatttttataaactttagccagtaatcgggaaaaactgtaagattttgtttgtaagctttataaacgttacttataagattttaattgaattctaaattaatttctaatttgaacctctcccttctcttagctttatatgcttggtcatccctccttaagtaattagcttttttgaagctttgttttttttggtttttcactgtttctgttatattgacgatttgactttcttataaattgttagtaatttcctgaataaagtacagaagtttatctttcaaatttcccatggatcatttcttaatagtcaaacaattgtctaaatttccaatacacaaagaaaagttttagctaacttacttcaataagatggataatttgttcaaagtgccaaacacatttgctttcgtaattcatgccatttgtgtgttaagtgtataaaagagatagagaaagaatataggaaatgtaactacacatgcaatcttgggctttccaaaatgtttaaagtaccaaattcccttggtgccaattgctttaggcatttcatcttcactcagttgcatcctaaatatagcgtaggtgtgacataccctgtaaatttcaaattcacataaagaagtcccagccttcgaggcaagtcttaattgaatactaaataaaaaccttagtgtcttctgaaatgtttctgaataaatagttgctttacagtctttgatttctatgttcgttagtgtccaaattcagaatgggaaccaacttggggagaaaaagaaaaaaagactctcaggacaatctttttaaaggagtaacagataatctattttggctaagacagggtagattcaggtagtcagataatagaaaggggagtcccttgtgtatcaactgatgctggaatttgtgaaatcctataaagttttgtagaaaaaaatgttaaattcatggaaacttgtttggtcataatcctcacagtttctaatttagtataacatcctgaataaattcattcagaccgacggagagaagaaattattatttgcaatatgtgaatttctgactaataggagtaatagaaaataattggtcccttaggatatttctgattatatatgagaggcttggggagggactctgtgtaaccgttgcttttaacccttgtttttgatgggtaaatagaacattaatgctacatgaaagatacttactctggcatcctcaagagaaagtaggttcttttttttctcagttatccaagaaacttttaacaattctaaagaaagaaataaaaagcacttagttttcagaagcatgtttcagcttcttgcatcaggagtaggccagatggccatgttctgtatggctttataaatattcctttttgttccatgtaaaagttaatggctagttttaaaccttggtatcatttcgaagtcagaccttatgtgcttaacttcattcaaagtatttctattttgttaggctgtaggaaaacatagagctgagctattaaaattccagggcagtttggaattgccaacaatatgtactggagagatgggggtggattctgaagtcaaatgaatttggaactcatcttcttttacatgctgggtgattttggacaagggggaaaagctacccatagggtttctgtgaatgttaagtgaaataatacatggaaagtgcttgaagtaatggtagggacacagcaaaccaaaaaaaatgctagccagtttattattagaagggaaaaactcctattaatattttcttgtttatgtttgtgttttcatgttagtcttaaaacaagttactgtttgagaatgtgagaattttaaccatttacaaaatggtgtatgatatgacatgtatatgatctctcacaagtgaaatgataatggaaagtttactgaaaatgtcttaacagttctaggtaaaacttaatttttccttaatttgaaaattaataaaagtatgaattagatttaatctaaatttattattctgttaaagtcacatgaatgtggaaaaaaatcagtatcacttctaactaaatctggccttgaaacttctttgacatagtcttcttaaaatatatatatcttatattctaaattgtatattatttagaaatatgctatttctaaactgaaatgtctgatatttctaactgatatatatatctatatatgatatgatatatgattatatatatgttatctatatgatatataatatatgatatatatttctaactgatataacaatgtatctcagttcttagagatatgtaaattatattttaatagtagcctacaaagatgatacaagaagataagaaataaatatacttttatatataaaatagttcaacagcaagattcttatttagaataattttctacagttttatttagggtagtttctatacagaaaaaatacatattttatctcctttctgtgctaggctctggagatgcaatggtgcctccctcccttcctggagcttaccaagcaaaacaaattcactaaataaaattattcctaattgtgttttaagtccagtgaagagaacacaggagggaccgagttaaacagtgtgtttgtgtatgtctgtgtatgggtgtgtgtctgtgtctgtgtgtctctttgtggctgtgtgtcctagagatgtactttagttggagtggtcagggaagttgagaactgaaagaaccagtcaaacaaacattggggagaaggggattatagcaggtacaaaggtcttgaatatccagcagatatgaggagcagaaaggctatctttttcaatcacttaaaaaggaaaagaagtgaaagattgctgtcttaagaacttaaatttatatggcactcatgtatagatttccagtgaaaagttggacaacgtgaaatgatgggtttcctacctacaagtctccagtgtttgtctttgactggggtgttttctgtacatatctgacctgatttctgttgctagcctgtcttcccaggggccttggtgagccgaggtcagagagagtggacttcacctaggaaaaaaggaaaggcttctgacataaaagtgcccttgaaaatgttctgctgctgtaaatcccttctctttacacaaagtttaagaccctcccaagagtttgacttgctaaactacaagagcatttttattaggtgtaagatctcactttgactttaagtagcaagtgacacaccaggcaaccctcgctgaattctctcttgccataagtgcatagatttcagtgttctaatgcctctctgagctaaatttgcctctgatctgagttctaaatgtaattggatagtagatatatgtgagtaaaaaaaaattctaccaaatggttggaatagttttcccaaagaatgtaatattggccttcagctggtaataggatgtgcctgctggatgaatgacatggttgatgcaaaagacagatgtaagccgtggttccccaaactgcagtagggatgagcatgacagccacacatatcaaaggccaggtactgatattcttactggaaagactgctcaggatgtatgtggtgttctttttcctggccacccttaaggagtttatgaatgggttccatcagcttcaaacagcaaacacagtttggcctgtatgaactgaaacccatcacacatcattgccacgatcattttcctcatgtatgcaagttctcaagtatatttttggtcacaaaacagcaaaatcatgacaaaagcaacaataacaaccaaaagtaactaaatacgatttttatttagtatgaaatgtattgcattgtaattatttcaacatcataacatttattaaagatgtatgtatcactttattattctatgctcatcccccctctttatacaaaatggagcataatctgcacattcattgttctgcagtttgtattttgcacttgacagtatgttgatacaaagagaagctacttgtgttgctctggaagaactttattgagatataactcgtatgccatacttttcatctatagaggttatataatgtattgatttttagtatatttacgtagttgttagttaatatctaccattctttgaccataatgaataacagggttttctctgcacagatatgtccatttaagtaaagatgccaatgcagctaaatagaatcactcaaaaacaactccaaaatgagccagggagagtggagggaaggaaaaggaggaatgcatccaaacatagccctacgttccatgaacactcagtaacatcatcaaaacgtgatgcaattaaattttaccaggtttactgctgtcctgatgctttccaattttttttgacaacagttttgcctttttcaaattcaaatggtataattggggcttggtagttgatgtttatcttaattgaaacagattctcttcatccttttgctctgagactcccactttgaggctgaaaggtcattttaaatctgcagagcactcgagaagccacataatgaattcaaacaaattcatgcctattaaaaggaggcttctctttctcaacttccagagcttacatagaataaaccatttggtttttgtctgactttcttttaaaaggaagttattgtgcttcctttttaatgctctaactacagagaatggggaaatcctgttttcatttattcttatcagaaagaaagtgtattttgctcagtaattgcaataaaatactactggggttacagctactatacttgtcaacaaatttaagggatattctttagctgcattactttaaggatttcttgtctatcttttatctagcaacttcattttttaacatttactctatgtacttgtgtaaaggtgcaaaaaatatatgtacaaaaatgttctgctggagtttttgtaacagaacactggagaaagcctaaatgtcaatcggtatatggctgattgaacaactgatgcacaactataagacaatactgtgcatctatgaggaagacctctctagtatgacactatctccagatgacatttactattgtattatttttatactttgaaaagaagatatgcacactcccatgtatccattttcactagttttctttgtatatactcttagagtttatgtaagtgcaatgaaaacataaattctattctcttcctccctttttaaacaaaaagaagtataatctgcacattcattgttctgcagtttgtattttgcacttgacagtgtgtcaatacatagagaagcttcttgtgttgttctggaagacctttgttgagatataactcacataccctactcttcatcaatacagggtgtataatttcgtgatttttagtatattcacacacttttgcaaccgtcaccaaaatcaatgtagaacattttactaccactataagaaaccccttaccttatagttatcaccctccatctcccccattacctgctccatatcacctgcctcccttccaccccacagctctaggcaacggctaatctacgtttttttcctctataatttgcctactctgaatgtttcatataaatggaattatataatatgaggtcttttgtgacttgcttctttcacttagcataatgttttcaagtctcattcatgttgtagcatatatcagatttcattttttaggaccgaataatattccattatatgaatataccacattttgcttatttattcatcagttgatagacacttgcgttgtttcactttttggctattttgaaatgtgctgcaatgaacatttatgcaaaagattttgtgtgtgcatatattttcctttcttctgggtatattcctagtagtggaattgctgggacaaatggtagctctaagtttaaccttttggttattttccagtgtatctgcattctcatgtttcttacagcagaaagttattctcttgaatggctgcatcattattgatgtagtcaaggtgtatttttaagtggaaaagttaaggcacaatgttcccagttatggaaaaatatgctaagactgtacatacataaatatgtttcactcaaaagcatctttctgcgtatgcacttaaggtgatggtagaagttgctagctttgaggaagaggtggctacacgtttggaatctgaggtagaagggggctgagtactcaccattttaaacttggggaaattttactatgtgtgctaattaatttttcaattgaaaatttgattcattaatgtaaagaagaagaaatgtaaaaaataaaaaagaagaagaagaagaaatgtattttcctggactcctctgaccaatgttggtcaggccaggggcttcttgacctgtgctttgtttgagtcatccggcaccatgaggtgcttagtgctgtacaagcactcttcttgccatctgctctgcttgacatcatttttagttattaggacaaaaaattaatgactgcttttctatctttaagccaagacaccatttaaaaaacagacatttagctcttactctaaattagtgtttcttaaatgttttattcaaatcaatccacatcaaaagcaaaataggagggaaaactagggtagacatctgagtgaaccttgggattgagaaataggagggtggtatgtgaactaatcattaatggtattagcaaatagagctgggcagtctgtctgaagtgcttcccagttttttgtacattcttctccaagtatcatgtgttggtgactggaagagggagtctttactttccgcacagtttccatcatgtagctctggaagggctttgtgtttgttctcatctttgcttgagaatcagctgtcttattttgggcttttctattttttaagacaaaacctacctatagtggttatacatgaaacacaccagtagatttgatttctgcctttggttaaattagtttgccttattaaatgataggaaagaatcaaaattcgtttgccttatagatttgttcattcttatattcactcatgtattcattaagcatttatttattcaacactcctatgacatcactcctcactgagtgatgattccttctagggtgccatagagggcttgatttccagctggaggaagaataatttaatatcctttttaatgatcaaaattctaaccaaacccaattttgaaaaataacttgactttgcctaaaagtacattaagaaagatatagaaaagagattctatgaaaatgaaatttaataatgtaaaataatttggttttatcagaaattcataaacagactttacttagagttaaaagtccctttgagaggagtaaaatcattaatgaaaaaaatgcatacattttcttcaatcatcatctatatcccatcgtgataatgaggagtacgctgtgtgtagtgactgtgtttgcaggtggagggagtttgagtaatggaagtaataaagatgctcccagaacaagtaccgcatccaattagcttgccaattaacaatctattcctgaagtatttgtttatgaagatgattttaactagagagaagtcatattttattttgtttatatataaagatatgttaatcataaaatgtattcctttcaaacagttatacatttttcctttggcagcactattgtttattttaaaggaaaagacagtaactaatcacagcatttttaaagaaacaaatagagattatgctgctgtaaagccagcataaagccatttttccaaatgtcaacagagttaacaaagaattttatgttgtaaaaacctcacagttgcctagtttactccctcatcaaaaaaagagggggcaagattctttgacatttttatgtataatgtgactagagaatgtgacttcagtgatgatgatgatctaattgcaatgctaagaaccatggctgggctacgactgtgtgtgcacgttgttatgctggggagcaagggtacctaggaaagaaagcaataatgaaagtatcacttgggtatttgtttatttctggatcttattctatctgctccatattatcactttggcatttaaaatctagatgatggctgggtgggtgcagtagctcacacctataatcctaacactctgggaggccgaggtgggaggatcacttgagtccaggaatgtaagaccagcctgggcaacataggaagaccctgtctctacaaaaaaatatttttaaaaattctccaggcgtggttgcacacacctgtagtcccacctactcgagaggctgaggtgggaggattgcttgagactgggaggtcaaggctgcagtgagctgtgattgtgccactacactccagcctgggtgacagcaagaccccatctcggggaaaaaaaaaacccagatgatatggttaaccatattcagtcattattcagttattagaaaataagatttacaaggcatccatggaggggaaaacaattacacacctggttagttgggctgaggcttgcagagataaaatcacctgcacactgttgcagagccagtgctccaacctagacttccggacaccaaagcctatggccattaagcactctgctggactgtatcttggatagtttgctttatggggaacgtagtacaactttacaatacaactttaaaaataaagtatagcagagtagcagtttgtccacagtcaaatatgaaatatgtaaacatttcacaggttctttttttaatttttattttaggtttgggggtacatgtgaaggtttgttatatgggtagactcatgtcacaggggttggttgtacatattatttcatcacccgggtattaagcccaaagcctaatagttatcttttctgctcctctccttcttcccaccctccctgatcaagtagaccccaatgtctgttgtttccttctttgtgtgcctgagttctcatcatttagctcccacttataagtgagaacatgcagtatttggttttctgtttctgtgttaatttgctaaggataatagcctccaggtctatccatgttaaaagacatgatctcattcttttttatggctgcatggtattccttggtgtaaatttacctcattctctttgtctaatctgtgactgatgggtatctaggttgattccatgtcgttactattgttaatagtgctggaatgaacattcgtttgcctgtatctttatggtagaatgatttatattcctctgggaatatgcccagtaataggattgcatggtcaaacggtagttctgctcttagctctttgaggaattgccacactgctttccacaatggttgaactaatttacactcccaccaaaagtttgtaagtgttcccttttctctacaaccttgctagcatctgttattttttgtctttttaataatagccattatgactggtatgagatggtatcttgtggttttgatttgcatttctctaataatcagtgttattaagggttttttcatatgcttgttggccgcatgtatgtcttcttttgaaaagtgtctgttcatgtcttttgcccaccttttaatggggttgtttgttttcctcttctaaatttgtttaagttccttatagatgcaggatatttgacctttgccagatatatagtttgcaaatattttctcccattctgtaggttgtctgtttaactctgttgatagtttctttggctgtgcagaagcttttaagtttatttagatcccacttgtcaatttttgcttttattgtgattgcttttggtgtctttgtcatgaatctttgcctgctgctatgttcaggatgggattgcctaggtcatcttccagggtttctatagttttgggttttatatttaagtctttaatccatcttgaatttttttgtgtgtatggtgaaaggaaggggtccagcttcaatcttctgcatatgggtagccagttatcccagcaccatttattgaatagggagtgttttctccattgcttttctttagctttgtcgaagatcagatggtcctaggtgtgcagttttatttctgagctctctattctgatccattggtctatctggctgttcttgtaccagtaccatgctgttatggttactgtatccttgtattatagtttgaagttgggcaaggtgatgcctccagctttgttattttttattagaattgccttggctattcgggctctttttggttccatatgaattttaaaaagttttttctagttctgtatttcacagcttctaactacattctattgttggacatctttatattttatccaaataggaaaacattaatttaaaattcttgtcatataatctacaaaatatttatattcaaggcacaatgacccttacatattctttttttcttttctttctttctttttttttttttcgaggcaggatcttgctctgttacccaagctggagtgcagtagctcaatcacagctcattgcagctttgacctcccatgcttaagcgatactcccacctcaacctcatgagtagctgcaacaacaggcgtgccccaccactcctggcttgttttttttaattttttttgtttttttttttgtagagacagtgtctccctatgttgcccaagctggattcaaacaatctgcctgcctcagcctcccaaagtgcttggattacaggtatgaaccaccatgcccagcccttaaaatagtttttattataaaggcaatttatgtgcattctaggtttctttaaaaacctagcaagaggccaggcatggtggaatgccagaaatcccagcactttgggaggccaaagtgagaggactgcttgaagcctagaaatagagaccagcctggcaacaaagcaaggccctgtctctacaaaaaataaaaaataaaaattatttttttatggtgtgtccctgtagtaccagctctcaagaggctgaggtgggaggattgtgttcagggtgcagtgagccatgattgcaccactgcactccaccctgggtgatggaacaagactcttaaacatacacacacacatatacacacacacacaatacgacacacgtatagaaaaaataaaaatacaaatataaatttctcataacctcaacacactcccaaataatcactgctaattcttagttattttcttctattctttttccaagcaagtatgatactaatagcaattacctggattgtacagttttaatttctttttttaatttagcattttatcatgagcatttttccatatcacttaacattatttcaaacattacttatatggatacaaaatgtttcaccctaaaaagattttgtaacttatgtatttgccaattattggatattcaggctgtttctagcttttcccaattattaaaattatcagcaaggaacatctttgaactgaaacattggcttatctctgaatatttccttagtaaaataactatgtcaaagaatatgactattttaagactattaatatatgttgcaaaaaatacttctctaaaggttataccaggttacactccaagccacactgcttgagagttctcatcttactgtgctgctgcaggaaatgtttttcattaaaaaaaatctttatccacatattaggttaaagtggtatttcagtgttgttttacttaacacttttggactactggtgtgaataaaaatggttttaatatttttattagccatttatcttctgttaattttctgtttgtctcttcgcttattttctattggggttgcatagttttttactttttgcaagagttctttatgtattagatagatgaaccttctccagctcacatttattgtaattatatattccaatttttagtcccctttttacttttgttcatggtgttttatacagtcaaatttattgattttttttcttttgtaacttctttctttgctttaataatttgagggcttttatcttaagagtagataaatgtttagctacattttccgtatttgtgattttttaacctagctcttaatctgtttggaatttatcttaatataaggtagggatacaagtttattttttcccactatacgtctcaggaccatttgttacatgtgccctactttgcttattgctttgtgtcacagataaaattttatgtatcatctatcatgtgtagacacctcagatataaattacattttacaaataacatctcaatagaaacaagtagaaaaaaaagaactctggtgcaacccattgagagaaacatactacattacaactataacaatgatgtaactaaatttctatttgccttctaaacctttttattgcttgtagccatttgctaactcctgaagaaacttttaccttttcttgtcccagggagttgattatttaattacagtagcataagacaaaatgataaggattggaatccgcaatgagccctttcactgggatgaagcagaggctgatgggactgggtggtaggtgggtaaggtggcagatagatgcaagagcaggaaccactcaccaggcactaggaaaagctccatctagccaggcatattggcaatagtgtgccctgactagtctttgggggcaaaacataacagtctcctaaaaagtggctcagaacaggtaattcctagacatatgcccaggcgtgaacaggacaacttattgaggtatggaaataaaatcttatattttttcttatccgctcacaaattttctttttcttgtattttgtaaaatagataatattttgacataatagtgcaagaacataacttattgaaaataaatatacgtaatggaggtgcttgcacttttttttttttttttttttttttttttactaatagatacggtatccaataaaattggtaatcacttgtctggatcatgtgacttcaggaagctctatacaccagcttgcagttcatggatgggacaggaagagagtatcttaagcctatgttggaaggccaggtggactggagtctcagggacggaagataagcacagggaattaaagcagaagccagtagtaatcagagataagacgtatgttcaagttaactgcagcaggatggtgtggtgctgggctcctgaatctgtttctgcctaaagtcatatctgtaaagatcaaggaggaggagccagagcagcaggtgaggttcaagtgattaataacactggaaaggagaacaggttgcagaaactatggctcaggctacctattcagccattttcattttttgtaatgcaagtgcctattacataatcaagggtatccttagtaacatatgaagcctacattctatttccatttttaaaaagttcaccagtaaacaattgtacagcaaattttatcaatgtaaaaagccattgtactctatccagtcaaaccatattcacctctcctaaagtgcccattacggaggctctgggaaattgaagttgcccttaatcttgagttacaatgggcagggcctctttttttctctaaattttactcaataaatgcaggcttcctatgcattaaatggtgcccacaaacattgaaactactagctcacctcctgaaattcagcactttactatgtgtctttcaatgtaagagcattcactaatttaacaagcattacataacatgtgtcattaatgagttcagttagctaggccatggaatagatattcctgtaaatcaactcctttacagttactaactgacttagtttcatggcagaggcatttatttcaattagactgtggttcctgttgagataaaatgagatcaactatgtgacatgattttgaaaaccatattatattggtgcatgaatgtatatgtgtgtgggtgtaggtagtttacagacagaatgtgtaacataggcatgtggcttgtaactgaaacttttacaaaacctagttcattctcattctataaaagtgtgtacacacatgtgcatatacacacacacactgtgataatgtatctgtgtatttgagggttataaatatttagttgtagagttctgacaaagtagtaaaatagtctcacttcatctggataaagatcaccatctggaactataaaaattgcaatgattccaaattgttgaatagttggattgcatatttacttttcagtagtatgttggcatgcatgtagatccagccttcctttcaacaaagaacagtggtggaagattcccttaaatggttactctttcctcaataagagcaaccatataaaaattatagaactattagtcatcatagttgaaagtatcgcataagattaacagagtccccatctggtgatatgtttttacatcagatttattaagatcagagcgggttttaactagagcaatgacactgctattattaaataagagacggaaggcctaatacataattgtctatttctttctagacatttatgtgtttttattaggataatgaatacagaattatcaacatcatgatcatagtttttttggtttttaagtagtatctgtaatggcaagctcatttttattttataacctacccacacacagacctacagtgaagcaaaacagatgctgaaatatgtttgttgccattggctttgaagaaacctcagagaggtttgcctcagtattttaaaagcaaaatggttggtacctttctgaatagatgtcattgtgtccttcaaacaaagctgacactgtagaaaagaaatggattgccttgtctttttaccagtgaacatcttcacctgaacaaaactcatcaggaaaaataaaggattttcgaagtgtagttgttgtttaagcagatactagttattccatccttacaaatattttatatataatatatacatttatatataatatttatatgtatatttcatcacacaccaacatccacagacacacacacacacttgtttgactacttcctctattccttgaaacgcttttgagagacctgaaatatccttgtatggcaagaggggaatggaatcaagctgatttttccatttttacaatgtgcctgggattgtgctttgcagtttagtggcattttctgattcaacctcacagagccctgcatggtataatattgtctacatttaagatgagaaaagcaagatgtggagaggctaggaaatcttcccaaaggcacgaagctcctggcagaaccaggatttgaggccaagtatcaaggttacagtacagatagacatacatacactcaattataagtaaagtttttatgaggctgggtttgacagcaacatgataagtagaagtttttgatttggtaagatttttcgaaaactcagagagtttattgccaaatttatttttctcctagaaacatttttgttgttgttgttgctggcatggacagttataaaaataaattagaagtaaacagataacagtttcctggctgccttcatgtctgtgagcctaacacggctcccagaaggaaaaaatatgcctcaaggaggcttatatgatattgcttatttagggaacctttgaccacttatttacaatatccagttacagctgtgctactttcctttttgggcaaaagcacatattcgcttgaccattattttggaggaagctgatattgcctgtcacttccaacatgtccttgtgtaccctagctcataattgcagcatttaagcttggagctcccctaacaacacaattattgccaaatttaccatcgttgggaacattggtgaggcctgcttcagaggcctctttgtcagcaagaagcatgttgcagatatgcttcaccttgcatcataaatgcatttctaaaagtagtttcctattgaattattttgtaataacatgtttttctaactacaaaataaacacatgttcattgtggacaaattgggaacttcagaaaattcccaataaatattccaatatttattaatattttataaaatacacataacctgtcattgcagcttccagggatagccatcattaaaacgtgttggtttatttcctgaataaacctttaaagcatatacacacataccccacaaacatgctcacacacacacatatatatatatatatacatttttatggtcatatatatcctattatgtgccagatgaaatcaggtcggtctctctatacacacacacacacacacacacacacacacacacacacacacagacacacacacatacatacatatatctatacatatatatgtatatatgtaatatgtacatactatgtatgtgtatatatgtgtatatatgtatatatatatgtgtatacatagtgtgtgtacactgtatacatatatgtgtgtatatagagcagagagacctacctgaatattcatctggcacataataggatatatatgaccattaaaatgtatgtatatgtatatmtatatagtgatgtgtgtatacatatattatttccaaattttgaaaatttttatttattattttttgagatgaagtcgccctatcgcccaggctggagtgcagtggcacaatcttggctcactgaaacctacgtctcctgggttcaagtgattcttgtacctcagcctcctgagtagctgggattttagttttgccccaccacacccaactaatttttgaatttttagtggagacagggtgtcaccatgttgcccagggtggtcttgaactcctgaagtgctgggattacaagcatgagccaacatgcccagcctgtatatatatataattttttattctgcattcttcgcttgacatttttaagaagtattttctcgtgtcatttaggattctagaaaaatctgatattctaatggtgacataggaatccattttacatgtaataaaatgatttattcaatatttagccattctttcattgttgggcattttaaattttcctcttttttctttattgtagtggttcactaagcatctttgtagaagaaatgttaatctgtatctctggttaattactttggcaaaatttttggaaatgctattactgggtcaaagagtttaaatggtgtctaaacttgtcaagacatactaaatatacttccagatagtttttacaacaaattttaagcctacatataaaaaaacagttccggtggctcacgcctgtaattccagcacttttgggaggctgaggcaggcagatcacctgtaggtcaggagttcgagaccagcctggccaatatggagaaaccccatctctactaaaaatacaaaaatcagctgggcatggcggtgggcacctgtaatcccagctactcaggagactgaggcaggagaatcacttgaacctgggaagcagaggttgcagtgagccaagatcactccactgcactcctagcctgggcaacaagagagaaactccgtctcaaaaaaaaaaaaaaaaaaaaaaaaaaaaggttattttaagaaattgtatagtgaattctcttttttaaaaaagggaaaacatttatatattttattaatatttaaacctgcagttttataaaattttgtctagtccgacactcttgttttacaaatgggaaattgaggccccagttccatatgagagacaaatacaaaaatctgccttctaaagctggtcaaaagcagttatatctctatgatcaattcagaagttgagtcctctgttgaaatgatttcaatagttgaggtgattttactgtttctctttaatgttgtgatatattttctctcttatacgactctatagtaaaaacgagaatcattttactcaatctggttcatgtagcagtatcaggctgtgaaattcatactgctcagacactggttctccaactgtgatgtacgtaagaaatactgtgcctgctgtctcttaaatgtagagtcctgatcttcatccctaagaccctgattcatttgctttagataacactgagagctaatcatttttagcaagcatcccaggtaattctaaggccatattgtgagaaaagccagtataacgatggagaattcttatgttgatgctctgacactggctctacatctgtccataatttatttaactcctctctgcctcagtttccttatctataaaggaggaaaggaaatgccagtctcttccacctgggattcttgtgagattaaatgaaataagccatgcaaatgatttaacacagtctacagcacacagtaaatactcaataaatgtgaactcattatcgttactgttgtcattggtattcatattgatatcattattcctgcattggaaaatgtaaatgtacaattttaagtgattagcattgctggtggattattgattgcaatttgtcctgctgtctcttctgacattgctaaatttcatttacttaaatatttcccttatttttctcttgttcccacccatgcaccccagtggagttgaaattgagttgagatcaaatgcagcaggtgttgctcagagaatttggtaagactagttgaaaaaagatcagtgaaactttatcaaaaatagaatagtgattctcctggtcacctgcttagagaacccattaagaagtgtgaggttctccaggccaccatagagctataatctgcaccttgtatcagccatagcaggtatttgcacagtaaatttcccctcacctagtttattcataggtctgatcatagcacactacagactcaaactcctgggctcaagtgatcctccaatgtcagcttcttgagtagctgggactacatgtgtgggccaccatgcctgaccatggagttcttaaaaatggatattgacatacatatatagaaaattcattcaataaatagttatcactttcctatacctggtgtgagaattatgctagatattggaaatacagaaatgaatatattaatattaaagtcacttaactaagcttttccctgtgataatctttctgaaacaaagcaaaatgatacagaattctttaagtactattcaatttgtggctatttcctcctaaagatcagtgtatctgaacttgctggctgctagatattttagtcatttcaaaatgtactgatttggctaaagaatctactttgaccaaaataggataccttaaaatacaacatcagcaaaatatgtgtaaaatccccagagaaaagccctcttaaatgcctacttatttcaagtcaaatttagttaaactacataacttagtcccctgagtgtcagtggaatttctcccagagctgtgacttcgtcaagtaaagttaccctctctcttgacctttggaaagagatggcatttgttgatagttttgtgtgtgtccttaagctgggcgcttaacaaatattctctctaacaaatattctctcattaaaacctgaaacagccttttcttacacctagaactttgtaaagaatatgtcaggaataggacaatcaccttttaaggctcagacagccaagaagctgttttctttttcagtcaagtgtagagagcatccatgactgccaagttctcagccatggctggtacaggcgggtgcagtaggaggcacagttgccactcctcagaaagaacagggacatggctggacccattgtcctacttggctcagggccaggcagggtagcagacctagttgttgaatgcccttttattgatagttatttaacttcaataggatcttgtttttatggtaggcagatggtccttaattggtttgaactttgtcctcttttcatagcagaaattcttaatctgctgcccacaaataagctttggagatctgtaactcccttaaaataacaaaaatgtacaaagcatttagtaagtgtcatacagtgtgctgagcacttcacatgctttatctcctttaaatctcataaagactcatcacataggtactgttttcattcccatttttaaaatgaaatttaaagagactaaatgacttgaagaaggtcacaaaactaaatagcagtagggtcattattttaggccaggttatctaactccaaagcccttagcttaatcactaggctatactgaactttatggaattacatccaaaagggatgtgtgtgtgtgtgtgtgtgtgtgtgtgtttgtgaatttttccgaagactcacatttccaaagatttataagtcatgtcgttctcaaaggggtctctggtctccaaaatttgaaactctttgcaacagggtggctatgttttagaatgacataaacagatacaatgttctccagagtccagagcagggtctaaacctattgggatactatacttgtgttatcaactgaaccacttggttagttcactaggaagatctgcaggtcttgagctgagcttagtgttttacagacatgtgccattcattcatcacctacaccactcatcaaatatctgaagaactatgaaggctgaaggaaaataagtgggtgagcacaggtgcaaataaataataaatttggagcattctatttcgtgttatttcttgctaaaactggcatattaccccaaacatcaattgcaatatgctattcaacaagagtttttaactagtttataataggaaaattgctcttttttaaaaaccagggttaaagtcacatcctttctctcctctgacaaagtcactgtcacataaaataatggtcctagagtcaaaataataacagaactttgttctgatggagactgtaaatataccaatactcccattaaaaatataggtgggctgcctgaactgagaaggttgtgtcatggctgttagttttaataactggaaggcttgacagagataattgcgttagtgcttcactggcctcaagatgcatgcaatgagtaaaattaagaccatcttattaaaataccaaagcattgtataggaaactcccatgtattcaaaggggaaagaagaaaaaggaatttcatatttacggagcatgtactattttcaaaactctgttctaggtgctttcacattcattaactcattttaatatgtgagtgctttgtaatcctttttgagtgttgcaggctcagagagggtaagaagctttgcttaaggtcccctagctggcaagtaacagaacctattcaaattcagatctgatttcaaagtgcatgtagtttttgccacagtacgatgcttggggagctaaatggcatttgggaacctagagttaaagcatcagtattttttactaaggggccattggatcctagagaggcaacgaattataatggataaaaatacaaatttcaggcaagttacttctcttagcaccattgctttatccggcatagtaataaaaatcaaatgagacaatggatatgaaatgctaaaaatagtacattctctgttgttattatctattgtgattattgtgttacccttggaaaaaggcctgtagaatagtggcagctgggtcccctggacagtgaactaccaacctaaaaactgtctgggcaggcttgcctttgggagttcttgtatatcagctctaattctgtccaggaattcagaggcagagagcagggttgaggagaatttcacaggtggtaagatctccggtgaggaggcatttcagcaacgtgatcagtgttgccaaagctatgaaagatgttgaagaacacactttctacctgagatatcaactaaagtttgaagcttcaggagaaggcatagttctatcaacagacagcagtacagcaccaatagttaaaccctatatggtagatttaaatgctgagccttcaaaatcatttgcctgttttactttagctccagcaaagggatagagaaacccttcttctgtcatccctctcccatgtttgctgttgcttaagcagtatttattttggtaacaagaatacctggccttgccacttaatctccaccattccaaagaaaacctttctgagatcatcttaacgttgtctctaggcaataaatatctctggtttctagttattcccaaggacactgacctcacatttcttactgtcttaaagtcaaaagtacctttgtccttaactcacaccaatatgtatgagactaggatatgagagagattgttacatcttgcttgatgttttgacattataggtagtgtaggttttgttattacagtttgacttttgaaatgcgtatgagatttctcaggtgaaatagagcctttgatgtggtactcaaaagggataactatgactcagaggaaccatttctaaaagatggcactctttctccttccagttctttctgttcaatagtagggctggggaaaggcagaggcagtttttgttatttcaaatgacagcatcaaagatagtaatccacggtgctcaacaaaagtcgaatgaccttttttccttctccattcataaatacataagagctgatgcttcattatgtttaaatacaaaatgcacactcctactttgttttcctatatgtgagttctcatgtattcttcaaatgctcatctaattactgttacctactattccaaatgcaaatgacaaggtcccagtttactgttgatcctatattacaagagtcatcaattttggttgagaaacacaaaggacaaatatctcattattgtgctaaccatgcctattattagttttgtgcccccataacataagtaatagccccaaatacatggcacttatcacacaccaggcataattctaaatggcatgttctccatgttatggaagaagagactgaggcatggagagagtgagtaacttggccaaactcacaaggctacaaaggcagagaatcaggttttgaactcagggctgcctagaccctgtgttcttaactatcatcatatagtgtctctcttactgtttctcactgaagatgagagaggattaaaatctcaggaataaatgtaacctccacaggtaggcttatgcataaaattcagatgcaatgaataacaaaatgactgcctcccacaaaattaagaagcaaacatataatgaggacttactctgtgcacacactggtgaggacacgttacacatttcatatcactgagttcacacacacacacacacacacacacacacacacacacacctatatgagggcagtatgatttccccatgtgataaagaaggaaagggaagctcagacagattagatatattgtctgacattgttcagatagcaagaagcagattcaagatgcaagcatagaccagagaccattatttgagaccatgaggccttttctcaccagttattcattcacttaatattaatcacttaatatgcatttgctgagcacctgtcgatgtcttgtaaatcagtgcaggaaaatcataagatttgaaatcacagcatctaggttcatatctcagcttcatcattaaccagcaaaccagtaaacctccctgtttgcagtttcattatcaataaaatgggttgacaaaaaatttatttaacagaaatgttatgaaatgcaaataaaataatggatgtaaagaaattggcaaatggtcaagcaaaacatgaatgttaattttatgatgattaaagtaaatggtatggagacccccaacctcaaatagctgggaaggggtagttgataaggggagaaatgtgtttaaagccagttgctttattattttaaccctgagataatgctttattgacagtgtgaataagatgtttggaattgtggaaggaagaactggaggtcatattacacatttcttactacatgttgagctttgaaaagtgagaatgatttcatgaggcagaaattggttgggtctaaaacttcattatctgtaacacatactccagagagtgagaacagtatgaccagaagtatctttggaggggctagagacaagatttgaagggaattaggacaagattttaaagtaacctaagtgccgtgataaagaatccacttttataggcaaaagtagttattcaaggaagtaaaataattacattttctagccactgcaagctatctctttttccttccttttcttccttcattccttcttcctttcttcctgcctttctttccttccttccttctctccctctctccttttttcccttctttctccatcccgtttaaccacacacaaaatcccaacagcagcgtagaaagtggtgttgaagagctgggcatgtgggcagggacaccaccaaggaaggtggtgtaatatagcctggtgacgacagctttggctcttctcaccactcccgctcccgagtaagcacagcatagaggaatatgagctgagttcagtgctgtccagttggaattgggaatgttaaagctagaaggtcagcaagtccggtgttctcaacctgacaacacatcaaatagctatgacagccttttgaaaatagagattcctggatccagcttcagctttaccgactcagagtatccaaaaggaggcctaagaatctgtatttttaaaagcctctccaaagtgatatgtagcagtaattgaaaaggacaatctctttacttcattgatgaaatagctaagtcccagagaagtcaagaggcttgccaaaatcacaacgaggtagtagcggggtcagaactcaaactcaaggctcccaattctcaacccagtagtattgcccagcatcagttcttatctttgcgttataaatacattcctgcccatcaacagtggattgcaaaagcagggaggaagagagggtggcaagggtcaaaaaatagctatcaggtcctatgttctctacttgggtgacaagataattagaagcccaaacctcagcttcctgcaatatagccatgtaacaaaactgtgcatggacccctggatctaaaatttaaaaatcaataaataatacaaaagaaatacattcatatttttctgaaatattcttcagaatatcaagtgggaatccctttgttttgcaaagctggtctgatatgtttaagtaaatttaaccagatagttgttttctgtatctccctctaagtattaacaaacatttaccatacactataaagcattacaatattgttaggatgattaacaagagtaccaaaatgaaggactcttgctaaaatccttttccagctttttcattctactatttacagacatgtaagcacatccattcatttcagcaaaatgtaacattccacacaaaggttttgaacattgtgctcggctagagaatatttctagtgagtgctcataagagacattaaaataagcatttgtctttcattcaagctttatgaaggattaaaagtaatccaattgttcaatccttcatttaaatctttagtccaaagaacagaagatttgggattgagtcgtaatccagccatttaaatctatgagactctaggcacatcattgccctccttcctgagcctcagatttttcttcagcaaataaggataaaaatctacactcccaatcccatcacttattgcccagggtcactgtgtgaattccactgaacaatgcctgtgaaggtgctcagaaacaacctgcttgtgagggcataagaagcacaggaggaaaaggcctttgggaataattcttttgtctcacccaggacaggttatctgaccatcaggggcacagatggaactctttttggacatggcaagtgggtaaagcacccaaggtgccctgagagatttttttcatgtggtctgaagggccacatactttcgtgggattagtggcatatgtggtatggaaactcataattacattgcaaatttaaaggacagctctgtaggaagaagccaagagcagaataagcatagatgtggtttggattttatttttcctcttgtcaaatttaacttaagttctgaattctataaaaaaagaaaaagagtggtgaaacagtcatattttaagatttttaaaagtcttaaagacatggaaaaagcaaagacgatacctacactgcttatttaaaaaaaaactcgatttgagtttcatgaagtactggcatttgctcactctgtaattctcaaagactattttcaaaatttggtcaaattaaatttcaaaggtcagcaaagtatataatcatgtttgggttcttttttcccccaagtttaaaaaactgacatctatcctttttttaggctatctgaatgtatgaaaaaagagtagaagttattttacagcatatatttttctgtaaaagtaactacatttaacattaaattatttaccagtggtattcattttatataagcaggctggagatggaggttctatttacatatttccactgtcatggtacagtatagtactaagtattttacaggccagcaatcaaaagaattacaattgctactaggaaacactaaatctgaggattctgtcatgactatgtatagctggttagaaaaatctttgctgaattgaatggctttctcattacagatggccttgtttacactgtacttagagttctgtgtgccattttggactcctcattaaaaaagcataagtcattttttaaaagaggataagtgggaaataaaatgggagccaagattatatcgaataaattctacaaaaaaagaaaaaagaaagacaaaatacacataattgaatatcataatctatctagaaaatagatgaagtggcacaaaaatggatgaatatattcaaatgtttgagaaatattacttcataaaaatgagagaaattttaatggctggagaagtaaaacttgattttttatttgagaacatagttaatgtcaaaacaaagaaagtcagcaatgaacattgcttctcaacttgaggtgattagagaagaggtcaaatgcctttagaaaacagctgtgcatttatcttggctgtggacctggcaagtcaacaggatttatgaatagcctcaccatgaatttggtcatcctgaggggaaggaaaaccccaaattaattttggagcagaagatcagtgtaactactaccatccttacgtcttctcaatgagcttcattattcctcccagagtggctagagtaggtagttgatgagcatttgtggaatggataggtatctcttttctatgacctactctatcaccctcaggatctattaatcctttgagtttgatctctaaggtggcaatgaaatatttcttacaccagaaatacactgaaactcagagaaagagggctcaaatttgaggagagtgctatactggcaagaggatgccccaggtaatatcctttccttcttctagagaggaacatttggctctagaaaggcatttagcctatgagttcagaacaggaatggtcttaggcatctgattcaacctacgacattgccagtctgaaccaactcatcctgatcccactgcaaatgagctaggcaacagtgaagagtggttctagtctgggtttggataaattgtgaaatatttctagaatttttctatagactctgaaccatttccccagaagtgtgcacattcaaaatgtcattttgcttcagaataacattttgaataaggcaagcctaatttttgttttttaacagaattttaaaataattaattcacaatatttgtacataggataatgggatattttgttacataaataggatgtataatgaccgagacaaattatttagggtatccagcaccttgggcatttatcatttctatgtagtggaataatttcaatttctttcttctggctattttgaaatatatgatacattattcttaactataatctccctattctgctatcacacattgtaacttatttcttctatccagctgtatgtttgcatacgttagccaacctctcttcattcccctcctcctggtagctatcattctattaccttcatgatatcaactttttttagcacccacttatgagtgagaacatgccatatttgtgtttctatgcctggcttatttcacttaacattcaggtcaattcatgttgctgcaaatggcaggattttgctctttttatgactgcatagtattccattgtatgtgtatgtgtgtgtgtatatatatatatatatgtattttctctatcggtttgtttgttggtggatactttggttgattccatatcttagctattgtagatagtactgcaataaacataggggttcaggtatccctttgatatacagatttcctttcctttcctttagataaacacccagtagggggattgctggattgtataatagttctacttttagttttctgggaaatctctatgctgttttccataatggccatattaatttatattcccaccaactaagaattcccttttctccacttcctcaccagcatctattttttttttttttggtcttttaataatagccattctaaggtaagatacctcactgtggttttgatttatagttccctgatgattagtaatgttgagtactttttacatacctgttggtcattttacatcttcttttgagaaatgtcttcatgtcctttgtccactttttgatgggattatttgggtttggtttggttttgtttttgctgttaacttgagttcttggcatattctggatattagtccgttgtcagatatatattttgcaaatattttctcccatttaacatgttgtcttttcactctgttgattattttctttgctatgtagagatttttggttttaatatagtcccatttgcctgtttttgtttttgttgcaatgctttgacgtcttaagggaagcctatttcgatctggtacttctgaaatctcattggctcaagtgaagcacgggtgtaaatcctgagtgtttgttaatctcggttctgtgtgtcttctgtaatccagagacaaattcatgtgtcaggttcacacttgagctgatcctctgtaactttgctgattgttgttaagacagaacagaaccagactggctttcactttacacaacaatcacaactgtgtgtaatgattatagacttattctctaacatctcttaagcacttaggtaatgagaaatgtcataatgaaaatatctgttaaccgaggaagatcaagggaacaaaacaaaaaacctaaatgaagtgtgaaggtggtagaagtaaagacatagatggtttcacttgggccagagatagattgaatgtgagacatttgaaagtctaatgtactttcagtacgtactttccagtttactttgatggaacgcactgtgttgaatgttattgtgctgacaaataagcccccaaattaaatgacttaaaaaataaactcattcttcatcaagtagcgttctaggatggtgtttaggaggatgtggcagctctccttgctctcagtcacggaccaggattctcccaccttctgtttctaccatccttcacgcatcagcatctttagcatccagctggcagaaaaagaacatcaagataggcatgtgggaggagctatgagccagtcctgaaagtggcatgcaatatttctgctcacatctagtcacttggccaaatctaattgcaagggaacgagaacttcttttatgcccaggaacaggcagagaatggaatatggcagacaacaagcagaatttcctatactcacagtcctgattattgacttctatgctttcccaaggtcattttgtcttcagccagattccatttcaaggaaacatgaaaatgtttcttcactctataaaatcattgttgaagtagatcctgctacctctgtggtagcccatccaacatcttaaaacttttaaaagataatttgtaaccatacataattcacccaatataagaaatcatgagagaaagctaatctcagtgtacttattatacaatgagacacataatgagacatatctttttttattctccactatatattttaaaagaattgaagaggcaagtgattgtttatggccatcgtaagataatattcttatcattgctttgcccagtaagattgaaaaaattgtctgtaattcaggccacacaaccctctgaagcccttcgccattcattcaagccccattaaggcagaaaacccatctgtttggattgttgaggttggaaactgaataatatcacttctccaaaatagatttaatagtagggctggtgaatggtttcctgacctgtttgatgcagagtgcaaacccagaggaaaaacatggtatatgagttttcgtatccattagtctaaaagaatcagaattcggttatattttaaaggcaattatagtagaactattacttttttgttttctgttataatcttacctagacttatttaacatacttaacacataatattttaaggctaagtatttctacaaaggatttatcattcaatcattcttatttagtcaataaaatcttttggagattaatttttagtaagcctaaatacccaaatagccaggaatgtgattgaggatcacatttttaaaacccatccctcaaaaagaaaattgtaatatcttgagagacaggtatggtttgaagatcacccctcttcaaagtgagttcaatatctgacctaatggaatcactccccattccccaggactaggtgacactcactgatctgggaaaaataaacacgtgcaactaacaagagaaattttgagaattatgagtaagctttgaaaatttgggtactgaaaatagagagggagggagagagggaggtgatagggagggagggaaagaataaaaaggaatgaagaaaaaactaataacaatttatctcttaagaaaatagaaggtgcagctgggtacggtggctcacgcctataatcccagcactttgggaggccgaggcaggcggatcgcctgaggtcgggagttcgagaccagcctgaccaacatggagaaaccccaaatacaaaattagccaggcatggtggcgcctgcctgtaatcccagctactcgggggcctgaggcaggagaatcacttgaacgcgggaggcggaggttgcagtgagccgagatcgcaccattgcactccagcctgcacaacaagagcaaaactccatctcagaaaacacataattaattaagtaatgatataaggtgctaaatttttattttcacccatccagtttcttttcttattctttcctgatatgtaattacctcagatgcagatctgaggtgaaactaatgaagatcaagctaagagcttctcactggcctggttccctttcaagttgtaagaagtggtactagcagctgcacgtagttttaggttttgtaaaattcaaaaaactaagatttttttgtattatttttctgaaagcagacccttataattgtataatcttcgtgtaccacaaaaccttgatcccacccctgattgcatggctgactgctgttcaaacagaaggatattcaaaataacccccgttaaaatgccttcttagagatgttccagattatttcttcaaatgtgctaatcaatctcattaacctatttctttaaataagtgaccaactcctagctaaattaaaaaatagttatgaagtttatttaaagtagaactacacagataaccatggtaaatgataaccggtatagaaaaagtaccgctgcgtctaaagatacccatgtattcacgatacaaatatttattgagcaactcgtacgtgtgaggcactgttgtacctgctgggggacacattaacgaacaaagtagatttttaaaaaaaaatctctgcacttgtggagcttatattctaatggggtgagtaagatgataaaataagtaaaaaacaaagttcatcagaagctgttaaatgcgatggagaaaaattaagagtaaggaaggttttttgtttgtttgttcaaaaaaaaaaaaggttaggaggttaggggtgccagttttaaataggccagtatgggaatatctcatgaaggtaacattgagctgatatctctagaaagaatatgccaggcaaagagaactgcaaatccaaaggccctggggagggagtatgcacagtgcttcaaggacagctagggaccaagaggctgagcagagtgaacaagagggagagatgtaggtaaagatgagattagagaggcaccagggaccaggtcactgagggccttaaaccattgggagaacgtagtattttctctgaataaaataggacaccattatgggataatgagtaggaacttgccgagaatgggcttacattttaggaggatcgctctgtctgcaatataaagaataaatgtgggtgggtggctggagaagtagcagggcacatcattaaaatatcaatgtttcaaagtcggcttattaaatcaattttacttgctctatgtcatagaaacaataaataaagacagaaacaccccgcaacactaccttgggtatttttctttgcttgcttgttttttttttttgttgttgttgttaatattttaacttttattttaggtttagggttacatgtgcaggtttgttatataggtaaacttgtgaccccgggggtttggtatacatattattttgtcacccaggtgctaagcatagtacctgacagttagtattttttttctgatcctcttctctcctcccaccctccatcctcaagttggccccagtgtctattgttcctctctttctgtctgtgtgttctcattatttggttaccacttataagtgaaaacatgcagtatttggttttcttttcctgcattagtttgctaaaaataatagcctgtagctccatccatgttcctacaaagaacatgatctcattcctttttatggctgcatagttttccatggtatatatgtaccagatttttctttatccaatctatcattcatggacatttagtttgattccatgtctttgtgattgtgaatagggctgtaattaacacatgcatgcacgtatctttatggtagaatgatttatattccttttggtatataccctgtagtttgattgctgagttgaatggtagttctgtttttagttctttcaggaatcaccacactgctttccacaatggttgaactattaataatttacattctaaccagtagtatataagcgtttccttttctctgcaaccttgccagcatctgttattttttgactttttagtaatagccattctgactggtatgaaatggtatctcactgtggttttgatttgtatttctttaatgattagtgatattgagcattttttcatacacttattggccatatgtatgccttcttttgaaaaatgttcatgtcctttgcccactttttaatggggcggtttggtttttgcttgaatgttcgtttaatttcgttgtagattctgggtattagacttttgtcaggtaatacaatttacaaacattttctcccattctgtaggttatctgtttactctctgttaatagttgtgtttttttttcctgtgcagaagctctttagtttaattaagttccatttgtcaatttttgcttttgttgcaattgcttttggcatttttatcatgaaatctttgccagttcctatgttcaaagtggtatttatttggttatcttccagggtttttatacctttagcttttacatttaggtctttaatccatcttgagccccactttgttaacaagacgctattcctctttggactttagcttgatgaagccacattttgagaaagagtgcattttggaaatatagcatcttagaagtgatcttagaaagtgaaagattggtagtaacctgctgtgagcagtacaaggaaaataaaactgagttattcctgtgggactacagctgactctcaggtccagcctggcctggagagcatgtgcttttctgctcttccctccatactcttagttagtggtcagcacatgataataggatgtaagggaagaaataaatctctacttgttttattctcaatcacagtgacacctgcatgaaattgccagagaaattaaggcctcccaatgactaccaaaaaaaaagacactttccgcttcccattgtcagcacgtattctgattgaatgtatatgtttactacttgaagttctcatgatttctaggtaattactgcaaatatggacctcatactgctactgcaggctttgcctcaagagtccaaataccatggcctcatgttagggccatttgagatcctttttgaaaaagttgctttattgtgctaaaaacaaagacacataatatgagatctaccctcttacattttaagtgtatagtacattattattagctgttagcacaatgttgtacagcatatctctagaatttattcatcttgcatgattaaatgatacacattgaacaacaactctccatttctccctccacccaggcccagcaaccaccatgctacttcctgcttctatgagttcaactactttaaatccctcatataagagggatcatgcaatatttatctttctgtgactgacttatttcacttggcataatgtcctcaaaattcatccatgttgtagcatatgacaggatatccttcttttaaggctaaataatattccattgtatgtatataccacattttttaatccattcgttcattgatggatatttagattgtttccacatcttggtattgtgaatatacataaatgaatatgggaatataaatatctctttgacatgctgatctcaattttttggataaatacccagaagttgaattggtagatcatatggtagttctgtttttaattttttgaggaacttccatactgttttttatagtagtggcatcactttacagtcccaccatcagtacataaggattccaatttctgtatgtccttgccaacaggtttttttttttaataatggccatcctaacaggagtgaagcaatatctcattgtggttttcctttgcatttccttaatgattagtgaggttgagcatcttttcatatccctgtttgccattttttgtcttctttggagaaacgtccatttctttcattgggtttttttaattttgaggggtttcaattgggttttgggggggttttgctattgagttgtaggagctcctatgtattgtagatattaataccatatcagatatatggtttgcaaatgttttctcctaatctgtaggttgtattttcactgtgttttctcccttgctgtgcagaaacattttattttgatgtagtcccacttgcctatttttgctttttttgcttatgctttgatgctgctgtggattaggaaacttaatattgttaaaatgtccacaatgtccaatgtaatctccatcaaaatcccaatggtattttttatagaaatagaaaagcagtcttcataagaaaccacaaaaggctgaatagtcaaaacaatcttgaaaaagaacaaaatatctggagatctcacacttcctgatttcaaaacatattactaagtgacagtaatcaaaacaatgtggtactggcataaagacagacataaaaccaatagaacagaatagagccaagaaataaactcacacatacacagtcaactgatctttgacaaggatgtccagaatatacaatgaagaaaagtcttgaatggtattggaaaatggtattggggaaactagatattcacatgcaaaagaatgaaactaaacctttatcttaaatcatacacaaaaaatccactcaagacttaattataacacctgaagctgtaaacctagaagaaaatttagggggaaaatttcatggcattggtcttggcaataatttgagatgctttcttagagagagtttcagttaagaaaatttttcttaacagtcattaaaaagtaatgtataaacttcaagtaaaacaatttttggttggggctttctggttgccttagtcaactcaggccgcataacaaagtaccctagactggtggcctaaacagaaatgttctcacaattctggatgctgagaagtccaagaccaagattggctgatttggttcctgttgagggctctcttcctacatacagatggctgctttctcactctgtcctcacatggtgaagagagaatgctcttgtgtctctctctgttcttataagaacaccagcactattggattagggcctcatccatatggcctcgtttaacatatgaattctaggggaaacaagatagatttaacctcaacctcaacctcatgtaaccattggtgattaaggcttcaacatatgaattataggggaaacaagattcagtccataacactggcctaataaatacttttcagaaaaattggccttttatcatatcattgtgtcaaaagtgtgctaagcaagtccagcttatcctctttcatttatagtccagacatcaaactcatgctatcatttccatcttgaatctctttattgccctgtgttacttgggagtgtcactgacaagccagaaacatatgttgtatatttccagtaccacctaatgttttactcataagtaagcatatacccttcatctttgtaccagtgtgtgtgtgtgtgtgtgtgtgtgtgtgtgtgtgtatgtgtgtgtgtatgacaggatctcactgtgttacccagactggagcgcagtggcatgatttagactcactgaagcctcagcctcctgggctcaagtgattctcctgcctcagcaccacaggcttgtgccatcatcgtgcctgacttttttttttttttttttttttttttgtagaaacagggtttcatcatgttgcccaggctggtcttgaactcctgagctcaagcaatccactccccttagcctcccaaagttctgggattacaagtgtgagccaccatgcccagccctgggcttttgtttataaaaatcatctgtgaaaacaaagggtaaaacgtgtctgttaaatatcttaactctgtgcaaatatatatattatacaagctaacatgtgtagtataatttagctgtgtaatcttgtaaagtagctaaatatcatgccttctccgggtatcctacttaaatttaatatgcagttttatgattgattgggaaagattgccatctgtgcatatcactgtaaaatgctagtttctacagtctcatctccatagataatcagagaaaagtaaatattaaaatggtgaattttgcaaatcattattttgtttacttcagagaagctatttgacctgcagggaaattttcaatagagaagtatcagtggcattgattagaaacgagcttcataaccttgtgatattgataacaatgggtaaaatatttagtattataaagagggaaaaatgtatgtagtcatccagttacagttactctccccttaagctcaagggtaagcctcccctccccttgagggcaaagcatcaaaatgagttccaatgtgttggctaacagcatgagctacaatacacaggggagagtggagtacaggaatataaacatcagtataattgtgacctgaggtccccaagctacaccctgtgtctggagacctgaggtctgaaggactgtttctgctcattatattcagctggagccccacctaggttgttgggacctccaagccttccacacttcctggtaggaaattattctttctcctcagtgagtaatatctagaaaaaaatcagcagtctccaccctccccagatgttatcacactggaattatggagttgggtggagacataaaagcagctgaaacttttagagcaatctggctccagcatctgtcacctcattgattgcaagggctgattcaggtgatttggccctcagttctcttcctctttcatctctccctttaggttcttcccaaagccatgtgttcaaataaagttaaagagaatgacctagatgaagatctccctgggagaaaaagagtaataaaaatgaaaaacaatagctgctaaataatgggagtgtactagctgccaggcaatgtggtgaatgctttccaaacattttctcttctaatccttataatggccctagagctaggtattgtaattatctttatcagcagtgaaagcctagaaaatacagcaacttgccctagagcacccaaataggaagtggctgaaccaagatttcaaatttaacctgtgttttctaactcttaaataaacatcttaacaggaacatttttggtaggtcaatattttctatgtgccattgttcttactatgtagtgaaaaaggcagctttcagatggtcctggcttcagtgatggctcccaggattcccagcgacattcagcaagatcttccctgtgagtggccttcatagatgcttcggtaatggaggctgctattgatagaggttccttagcagctgctccactgaggccctcattgccccacccactttgggcttcatactgggggtcagtgctaagtataaggtcctgatggctaggatagatgaggaaagctatttactcagcacagtagcaggactctggctcaggagagggcccatatcatggtcaaaaataaattgggaaaagtttaaactagggaagcagtgtctagcaaaaggccaaaaagatgagaaatgaccttcagcagacaaacaattacaaggtcagtagacacaaagtatgcgagcagttgagagcgtggatgaaaggtagattggaactgtattaccatccagtaattccactgaaatggaacagtgtggagaactgggagtaattagttcattcgtcagtttgtccgacttctctttgtttcttgkagggggctggttccatagaaaaggatgggtctgtggagtaaatggtcatgagtagtgctagccacacacattctttaacacttctgaatgcagcaggccagctggtcattactgttactgccccctcatgggagaccaaatatagctatatcattcctcctccaaaactgccttctggcaaaagttatctcttttaagaattgtgtgcattcttaaattgcattaagggaagcaaacatatggaacaagaaagcacctcacttagttccatttgctaagcccttttgcagacccactgacccttccttaattccaaatgaaatctcaaatgctataaagaaacccgccaaatgggttacagcaaagacttttttacaccctactgttatgttcagaattggaaaaagctggggatttggcaaattccaaaatgttgggtcatatgaaaacttttttttttgagacagagtctcgctctgtcgcccaagctggagtgcagtgacgtaatcatggctcacttcagcctcgacctccttagttcaggtgatcctcctgcctccacctctggggtagctgggactacagataagcaccaccacacccaggtaattttaaaattttttgtaaagatggtgtttcaccatgttgcccaggctggccctgaactcctgggctcaagcagttcaccagccttggcttcctaaagtgctgggattataggcatgagccaccacacccagccccatacgaaaatttagtctcagaattagcctttgcatgcgtcacctgtaagttaatcagaatgttactttcaaaagttccmtgcaggtgaggaagctaaaaggtattcttgtatttttttaaatgaaacttcataatagaggtgtaaacagagtccattctccccagccttagaatcagacagcttgagtttaaaacccacttatgagcttgagcatactactgaacatagagtcacttgtctatgcctcagagtccccatggtcgaatggaaaatacagtgcctacttcaaagtgttattgtgaggattaaatgagataatatatgcaaagcacagcgcctggaacatggaaagtgctccagaagttttattgttattaacattattattattgccaccatcatcattaaacttggtaatttttactctccccaatcctttagttactttttcaaacttctagttttttgcttgggctccatctaattggctgtgagtcaaaagagaattcaccacatccaagtgttttctaaagaatgtctttggaaaattcacaactgatcattttgataccagcatctaaggttagggctaccttatccttcatcaccttcttgttttattcataacaccacgatgtggactattgataaaattatgtttcaaagataactagcttatttgaagccatctataatttcagcccaaactgactaattaggctaactttcagaaagttaagtaagtgtctaattctcagttaacttactacctactgagtaaaaatgtgctgccttttaaaatccacaactaacctccctactcaaggcaaaccccctagttctaatatttgaagtatttaatgaacaagcctttttgggggtcctcttgtagttaaaacatttatttttctcctttttttttttaactctgttttttgtctttctttttttttttttttttttttttttgagacagagtcatgctctgtcgcctagattggagtgcagtgacacgatcagtcactgtaaccttgaactcctggtctgaagcgatcctcccacgtgtgcctctaaagtgtcgggattacaggcatgagctactgtgctcagcctctactctgttttctaccttttatttgttgcaaaagcaacatgtttattttaacaaatactggtcttcctcatcttactcccctgagatttcaatgttaaaagttgatttgtgtgtttccacgtaagtctttataacaagcttctgctgacactccttggcccagctttccataaacacatccatccctacctattaggttgaactgtacaaaattgccatttttataggtccccactattctttaataccaagcctcaaatttagccagacactaaatgtcctgttttatatacacgccttattcattccttcttggttttgtttttgtggcttcacttttgctggatggcctccacccccaaccccagctctactctggctggacattttttaactctccttcaaaggtgtacatcctgcaacttcttaaattccctttacattcattgtctacatcacatagtctgattgcctatataatacaatttcgtgttttagtatttatatgctatttaatacagatgccacctgttttgctgcttttattttctctggttgcttgatgttctattaccttractagactttagtgctttctagaaaaggacaatgtgtagtatatctgtacttattcaagtgctgatctaaggacataggatgtaatgtaaaagtttattcaatgactatttcaaaatacaaagtctctctttgtataaagtcattcactaatactgacattggctgatacttcagactggagattctcggtaatattactttttcttgataattaattttgattatamgaggatttaatatcatggaaataaattatgcaaatgaactcagaccctaggttcacttcccagaacaaaccgtattctgagaatacttgtggtgccaaaatttagagtgaaaccccagactattaatgatgctcaagttactttactccaacacaataagtactcagtgatttgttacrgaaattcaattaagtcttctcaagtattttttttcttttcttttttttttttaattatactttaagttttagggtacatgtgcacattgtgcaggttagatacatatgtatacatgtgccatgctggtgcactgcacccactaactcgtcatctagcattaggtatatctcccagtgctatccctcccccctccccccaccccacaacagtccccagagtgtgatattccccttcctgtgtccatgtgatctcattgttcaattcccacctatgagtgagaatatgcggtgtttggttttttgttcttgcgatagtttactgagaatgatgatttccaatttcatccatgtccctacaaaggacatgaactcatcatttaagaaaaagtccaataaaatatcagtcactatttttagatcttcattctcaatgtttgtaaagctaatactaatattagattaatgtaattttatcaatattgataattacttagtatacattgtgaactttgttttttggatgtcatttaaagggttattttcatgagttcctaagaaataatttaggcctttaaggttatttaacccttcagtagaaaatagtttccttgtttaagaaaatgatctccatctagtggacaaatttttatattacagtatacaaagaaaaatattaaagcccctagaatatctcatatcaagcacttcctgacctattaataaatgttttggttttagtgctaatattatggcttaaaagttgtaagatttaaaaatatcataactatctaaatgacttaaggtatttagcaatatttgtttcaaaacttatagtggagtgttaagacttgcttgatttaattggaaaaattataattaaagaaaaaattactgatttatacaaatttggtgtttactcagttgaactgaaaaaaactaaaccaaaactcacacttctgtatctcttacatttctgttcatgcacaggaaggagggggtattttcttttttaaagtgtagcaataagaatatcttgatattaaagggaaataaacataaacatttctacaggcattcacattactaggtcctcctcatgctgaaaagctgccatgactatcttcttagaagagaaatctactttgccaaacccccactatttagaagtttttaatgtcttccagttgtgtactaaataccttcaaaaaccttcttaaatactactcttcatgaaaacttctcagatatcccagcctgagttagtcattcatcctttatttttgtatcttaatgcactcatattaagtgcttaataaatgcctatttaagcatatccaaggagagtttgccaaagatccctaatgtatgtctattgaatgattagagaccatcctccccttccagccttcctgggaattgacaaggtttcacatacatatgtgcctatcctattctggtgaaacagatgtcccctgtttgggtgccacatatatttgtggtttatataatcatgcagtagagctggaaggactttaggaacaatcgatgattcaatgcagttagctcagtgactggtcaattaacttttctaggacctggtatcctcgtctgtaaagtgagtctgttcgacttgacaatctctcattgtccttcctgaaccaaataaatatatctataaagagacacaattctaagaaaattttaagttggaaaaacatatttacagctgctcaagataatgagttttccctcttctgtttatttgatggattatttcggagccactgttatttgatcacagattcwaaagtgatccatgaaacatcttccaatcttagagtcataactctatttattaatgactccgataaagaaaataaaggaatgttttaaaatgagctagttaatagtttgaataaagattctaatggggaaaatattaatgacagcaaaacttgaattcacatgtttatttattctttcaacaagtttttctttaaaaccacacacctgctgggctatcataagctatcaccctcctctcctaagaacacatgaaagttgactttattttaatactggttgatgtttcactagaaaggttctttgtggaaagtttatctagattataaggactatgacgttaagaactgtgtgtgtagattttttcccagctctaaaatatgtattgctgagcacagtgccttttattcatttaatcatttactcaagacacttgggcacagttttcaatgtgccaagaatacgctgagtctccatttgtagagagctcacaatctaggaatggagaccgggtgaaaaacattttcaattcattgtaaattctgtcattagggagtgggaaagtgtcttgggagcgtagagaaagggcctttcataaagctctgatgtaccagggtagcctttcaggtgcaggctaagtctcaaggatgagtgacagttaggcaggggaaaggggatttgattatttaggggagcaggaggtgaggtggtgatggcctgtgagaaggagatagtgcctcaatatgagttgagcaagaagtacccaatagctgaggatggcaagttgaggctgggggcaactaattgcaattgagagcagatggttagactggcagtctggcaaagaaattttgacttcatcctgagagcaatggtaagttactgaagggttttaaactgaagaatgacactggaaaatggattcaagacactaatataaaggttgttataataatataggtgaaatttgatggagacctgaatttaaaatattggtagtagggatggaaggaagtgggtacaatagaaattaatgcttggatggatgttatagggyaggagtgtggagggagaagcccaggtttgggagaacagcattaggcacaaaatgggtatttgttgaatcgaattcaaatatttgatgaattactgtgtatttgttattttccgaaaggaattttgtacttagaagattatgttttgcagagtgtttcccttttaactgaagtagagtttggaaaaacctgtatcttgtatctggtcagttaacaacagtatccaggagaacaagaatgtgaagtcaatgtgtttttcttttatgtatttcaatattatcatatttttatggcagaaattagctgtaattttcattcctgctaattccactgtcagttcctcagctgacgctaaatgctttttgaaaatatgaacatgtgaatgttcacagcaacataattccttctccttcctttacagttttgatgtggacaatggcacatctgcgggacggagtcccttggatcccatgaccagcccaggatccgggctaattctccaagcaaattttgtccacagtcaacgacgggagtccttcctgtatcgatccgacagcgattatgacctctctccaaagtctatgtcccggaactcctccattgccagtgatatgtaagtacaagggcaggcaaagagagagaaaaccgagtaaatttatatctagagctgatgacataataaaactaatgacttttgttcaactgtatcactctcctccaatgtagaaagaatatgaataaaattatacaagctagaaatgaatggtagatttaacctgagtgcactgtcactcttgattaacacacacacacacacacacacacacacacacacacgcatgtatttattttcccagaaaatactttataggaaaactgagaattaaatttttaatggaaactaacacttaaatcattagcttatatttatgtagagcctgagttttagctacctaactacatggatattttctaatattttgaaaagctttcaactccattgaaaagtcctgtgataatagactgtatagcattttgaatatatttcaattaatgtatgtacagatgttagcactggtttgccagatcatttaagaaatctttgtgggactttgccaaaattaaaccaacttttaaggatcatgagaggcaagcacagaaaacattagacagacttgaatatcatttaagatatagtacagcttgaaaaacaatgaaaactgacaagcaggtttgcagatcctgtaccatcactagctcattttctcagtgcatttcattcttgtggtagtgtgcatgtttttctacataggtctttattctcactcaatacctatactatcattcgtggcacatctgcctctgtatagaatcgatcttcatctttctctcttggtctatacatttgtccaataacattcaccatcttttcatgacacccatctcaaaaactcataacaggctgcaatttatcttataagaattagtctgtatggaacccctgagtgtctagtgttattcttgccattctaacagagcatcagttgtattgcaataggtctacatggggttctagaaatgaaattatatttcactcatttttacaaactatggttgctattttagcagttgtattattgacgtctacccttcttcatctctaaacaactttctattcctagtggccctatttttacattatttttatctcacttccttagatttgaaattcatgacacttacttattcattcacacataatgagaatgcttcttgagcaaatatggtgtatttaaagctctgaatctgtggagcagtgaggtctggcattttagaccattgtaataaaatatggtgagcacaatccttgaggcatttatcatgtactgmaggaacagagagaggagatggagagttttccacccaagggaaagatacagaaaataccgggctaagggaacaacatttactaaatgtgaggcatggaaaattatggctgaactaaggaatgacaatctgcttgatgtgaatagcgaaacctggcaagagagaagaaaatttcaaatacagtctatgggacctgagagccacagaggtttttagctgagttttggcatgatcatattcttgtttttattgcatcttgattactctattgttgaatgattgcatagcgaagtcactacagggaagtatttcatgtcgaaattcacagaagtaaggcaggctaaatatgatgaagacctaagtcaagggagtgatggcagtggagcaaagagctggtttagatgcaagaggcttatagaatggttgtgtgtgtgtgtgtgtgtgtgtgtgtgtgtgtgtgtgtgtgtgtgaagtatgtatgtatgttgggggacagccagtggagaaggagartcaaagagagtgctgatttttgtccatgaatgagtacgtacatggtgatgtacgtacatggtgatgaggaacaaagggcagagagtagaaaacatgacagataacaggtgatgaattggtttgtacatgataaggctaggggaaacaagacaacagttaaagtactgggacagcaaacagaaataacagtccagaggaccaggagaaatagaacagttaccttctataattactaggtttttgaatgacagttgagtggtgcgttgtattcaggtaatagcattaggagcccctgggttaaggagtgaattgaaagtggaaatgtgagcaaatgcaggcatctctttaaaaggctgatgggtggagtaggaagaaagaactaaggctgcctgacagagaattaggttcaagcggaatttttttgaattcaggttacttgagctgagggaaggctccaggagatagaaagagactaaaaattcaaggggaaagagggtttaaagatggagctgtagttgctgacaaaaacatgatcatgagccaaagtaaggaggctatccttggaaaagtagtaaataccagaactgtattctttaggaaggacaaagaagacctgccttggcaacatagtgagaccttgtccttactaaaaatccaaaaaaatagctgggcatggtggcacatgcctttagtcccagctactctggagaggtaggaggattggttgagcctgggagttcagggttgcagtgagctacgatcatgccactgcagtccagcctgggtgacagaggaagacaagactgtgtctggaaaaaaagaaaaaaagaagaaggaggagaaggagaagaataagagagaagagaagaaggagaaggagaagaagagtaaaagaagggaaatgtaaatttagagatggaggagtaaaatgttaagagatattagccatgagttctctaaacattttactcctccatctccagatgaatgaatgtaaaagtagaaggtacagccatcaatagccagaggagagagggatggggcagcttgagaagaaagggaaaggcttaaaaaagccactatgcagatcaaaaaagggaacagggtaaaggtgagtagaatactgaccagccccatagataacaataaacaatgttaaataggcgaatgacagaattgaaagtcatctaatgcaacttcatcaaaggtgagtcaggcttggtattgacaaaagaaagaggaaaactcacagtgagttagtggagtccatttatgtagttatgtgttctacctttttaaattgtagtaaactgagtttgggatagattgtttctttcatacattctactccagttagtaaatattaaatatatacatatattttatgaaaagcttatagcatttcatatttaaatatgaaatgcttttatttcaaaatcaaacttgcaaggatacctcattttgctgtgtgcctcaagagttctttatctgatcagactcaggtaggaatgatgagtttaatcagaccatgagtcaacactatattttgctgaaaagtaatgtgtwgatatgtttagctttccattctccttggatatttacattggagcagtaagatattcctttgataccaactcctagaaagcattctttctaccaaggagattaagtttctgtggaaggaaaaggaaatagaataaataataactatttcaacatttaatctgacacgacacatatcttccaccataaaggactgtgccttctcttaatttgaattctcatatggccatgtgtaaactttaattttctcaccttacctagttcacaataatgctatgaagactgtctgatgtgtataattcaactgcgctttatagagaatgatgttatatatttaattacttgatgatttcttattaatagttctagttaagctttcctattgagaaattttcttagaaatttcaaatacaaacagtacctaatgaggataggtacctaatgaagggtatttaaaatgaaggtttgtggttatctatttaattgaactgttttggaaaacctttaaatactctttaagtttaaatataactatttactctattgggaaagtgagaagaaggaagataatcccttcctagtagataggatatcgtcatcttatcctctataaatagaaaccaatgaaatagctgaagaacaaaacagataaagatggtagtaataataatcataacatacatggtgtgtgtatatcatcaactttcccaagtattttcacaccagctatcttatttgatatactcacagtccttttgatagggacattgttatgccattttacaggttagaaagccaaagtccaatgagcttaatcttttgaaaaaaaagcaagcattttgattatttctaggagcacataatttgataatgccattgtaaacaaagtactttatactactacagcaaaaactgctgagaaacagaagtaattgttgaccaaattcattaaaccaatgaaatacatagcagtatcaaaatttgattaagaataaaataaaagctcaaggaggtacaaagtaaatatgcagccaactcttagagaatgtatacaagtatatagcactaggctaaattcagaatctaaaaaattagctcatataaggcagaagagaagttcctgaccacttctgctcagagaccgtcacacaatttgttaaatatagatgatgcagtagcaacttaattcttaagaaaagtaagaaaaagaaaaatgttaagtattagcatgagtctagtaaataaatacatgaaaataaacttgcattaccattaatagtaaaaattttttataacagtagaaacaactagataacaaaaggctggttgcccaagtggtgtcatgaagtaacatgaagaaaattacagcgtaaatagacaatatttttgtcatcttaatatttcagcatctgaataacaatcacttctgtgttttcacatcatccagtaatatagtatctgtatttggaaacacataaagttatgatacattgcaaagattaagaggagaattagcaatgacaagataagtagaattaagtcacaaaactatgaatttattaagtataagttacctgtcaaactacttaagttttaagaaatactcaattcacctggataactaatcctctattccccatcctctgttaaattaacaccaacacatagaatgcaaagatgatccaatcggctcttcactcacattcatatacattgcttctacacacagaatatggggtggggtgaatgcattcagagggccagtgacgaggaagtgagtagatttgatataccataaaaagctggggcatatttgggaatctagctaagttatccccaggcactatacagatatctcagacctcactgatcaggccttcggggtgccccattggggcattttctcagctagtagataatactctccctacctcccatgtcaaactactgtcctttctttagcaattaacaagtccctcaccacttcttgggcctctaatgtgtgttttcagtcacagccactcctctctactacttttgcctgctaagtataagagtagtattgcttccagtcctgagtttgaaaaaggaagaagaattccctttatgtcaatttgtatcttttattccagattattaatcttccctggtctcactaggaagaatataaataaaaagacacgttgcattacaaaggttctaattctcactggatctacatgaaaagtttgtagtcatctcttacctagattgcaagataatattacactaatgaacatttcaaaagcatatcaatttgttatcttgaaagctttcttccattaaccacagaaagaaagctaccatggccaaatcatctcttccccagttctgggtttttcccagctggggaggtatcctcacccctcaccctgtggtgtaggagtgatgggactagggccagagttctcaaaatgtgtcctgaggcaacagagggaatgtacatgggtgcaagcgttattttaaatgttcaagaaaaacacgaaaacatctgtcaaccacctggaaaactaatagcttggaatagttcccagtttccaattaagaccatgatattcctttctgtgacaccatatctttgcaaaattgggttttcagcagttgctggataaaaatgaagtgctgagcagaaatcaatgtgcaacaaaaaataagggaggcaatgtccaatctcattccaaaatgagaaattgacatagtgctcagtgggtgctaaattgttagaacaaaaccttattaagttatttggacttaactatttaataattggaactattatttattttggccaatgtgttgctgttattaaaaaattgagatattaagggcaccatgtactgagaaagtctgaaaatatttggattagttgtttattcatatctgaagaattagagctaaatcaggctaggcatggtggctcacatctgtaatcctggcaatttgggaggccaaggcaggcagatggcttgagctgaggagtttgagaccaacttgggcaacatggtgaaaccctgtctctacaaaaaatacaaaaatttgctgggcatggtggtgggcgcctgtagtctcagctacttgggaggctgaagcaggaggatcacttgaacccaggatgttgaggttgtagtgagccacgattgagccactgcactccagcctggatgacagagtgagaccctgcctcaagacaaaaaaaaatgattaaagataaatcagatctctatgtgagactatttgagagaattttgttaggagttaaaaaaataacagtttccaagctgtgaagtatctgatgtgctctagagtagagaatttatctttttcttaattctgttaggatcccaggtagccaaaatctttttttataaaatgtgatattattttggtaatgacctagatagaccaggctttttcttccattgctgtgtgctggccactgttactagtattattcggagtgttgatgcaggcattaatactagctattaaatctcaagaagtttattggcaaaatatgctaaggtcatctgctactagaatacctttttactatctttttgtttaaaaattctgctttatttggtgccatttattcaatcacttaagtcattttatttctgatttaaaaaaatgggagtttcatgaattgtaaaataagtcttataaattagctaaacawgtttcttcaatccttgaactgggggatttaaaatattagctgaataggcattttatattcctaatctcatactttcaaaaaaatcataaaaatgaaatcctgatgtttagacattttaaatggtaatgtttttaatgccacagtataaaaataaagcattgattttaatgcactgctacagtgagatggtgccagcacctctaagtatcattgccagtgctctaacctttaaaataacgaattaattgagttatatgtagtaatatatcttggctattactgccaaagtaatagatatatactgaagtcttaggagagatagagggataaatgttagtyataaaaagttgttaaagcagagggaaaaagaagtgaaaactgaccaaacatatacgtaattcattgtttctatgacaagcctgctgcaattcgaactctaggactttgtgctaatatttagcataccattttattttctagatttcctttatactcactatgttcctcagtatttgcactcacttcttttgtttgtttgttttgagatagagtctcactctgttgcgcaggttggagtgcagtggcacaatctcagctcactgcatcctccgcctcccaggttcaagcgattctcctgcctcagcctcctgagtagctgggattacaggtacctgccaccgtgcctggctgattgtgtttttttttttacttttagtagagatggggtttcaccatgttgaccaggctgggctcgaactcctgacctcaagtgatcctcccaccttggcctcccaaagtgctgggattacagactgaactcacttttaaatcttttaaatgtgaaaaaaaaaactctaaaaatcatgtgagtttttctcactcctgtataaaagagaaagagtgtgaaggtgaattatttaaacttataaataatgattatataattatgcttatacatcagatttaatacatttcaaaggataatatctactttctttaaaaaaaaatgcagggagaagtggtagtttaataacaagagcaattattccacaatcctatgagacactgaattcctgccagaagaaagtaaactcagaattggcctcagtcaaggaagattagcctatttttcagtgcataccaaaagaatgcaatctctaagagcacattatgtgtgaaataaactaaaataaggaaagtttgaagaacattttgaaagaaaaaaactagtccagtaacctggatagtgctctcaatgaaacacggcccctagatgaaggacccatagttgaaaattactgattcttcctgcctcttgaaattccaagaggcaaatggccattacaggagagatattggttcacccagttgtggatattgtacctagaggtacactagtgtactctcactttatctcaaccctcttccctctgtatattaaagaagactaaaatcaaaaccatgctccagtgtattgtaaaatagaaatattttgaactttaatttttttttcttttcttttgagacagagtctcactctattattgcccaggctggagtgcagcagtgtaatcacagctcactgcagccttgagctcttgggctcaagtgattctcccacctcagtctccctagtagcccaaacacaggggtatgctaccacacccggctaattttttttaatttttagcagaaatgaggtcttgctatgttgcccaggttggtctcgaattcctgagctcaagcaatactcctgctttggcttcccaaagtgctgaaattacaggcaagagccactatgcacagcctgaactttaagtcttgacggtggggcatatggtggcaggctgggaagaagaagaaagttgacttctattggagatgaccaatacgtgttttccaccacattctaaataaaggtgtgtattaattgatgtgcatttttgaatgagtatcactgttttactcgtttggaaaataacagtagcacctactccatgccagggtatcatttgaagacaccatagatccatgaaagtaagacaaaaaaattgtttggagcatgcattcttgtctttatttaatttttaaaaattcttgatacaaaaggagatgtttccagccaacactgagattcccatatgaatacttgttttcacttacacatcaatcattttaaatatttacttttgcttgtcagtcttagcttcttaatgaattgttctcaatgtctcctttactgttttctgagccatataaggaaaaacagtcacactgctggaacatttatgtgatgtgtttcttgagataagatattccagggagtattactaaatcatactgtctaagcccttgcaatatgaatcatctaaagatgtgcttctataaataaacagaaagaaagcatcaagcagacccatggtttttctttagaaaaccaagtaaggaatatcaaccactgggctttgctttcagattcctggtaatctgtggtatgattcacaccaggttcacagaggaaacaaccccaattattccgtctgcctactgcagcatctcctaggctttgtgtccacctacggttaattgccttgagactttatggtttttcctaaccttgggtcaagaaaaatttgctgacattgaatactggaaagttgtatctaaacatatataatgtgtcaattcctgcaaccctctctttaagacgcagggaacttcagagcagaaagaaaaagaataactgctcacccctcaacaaatgtggaaggttgtgatgtgacaagaaatcatttcaccagttcagtaaatgatgttgtctcccaataaatgtcatgaatgatcccaagtccaaaattttttaactcattgtttcactcccaagggagaacaaagctacatgcagatctcatatttccatgtttcaaaattcattttttctttggtgcttacagaacttcaaattgaatttgttataaccaccaagatcagttttgtttttgtggattggtgtgtgtgtgtgtgtgtgtgtgtgtgtgtgtgtgtgtgtgtgtgtttagctagtggatagcatattagacagcaccgagagtcttgcagaatattctgttgcagaaatagaatgttgcagaaatattctattggacagtgctgttctagagtctaaaacatttacttctatgtgccttcagaatagtctaaatccatttgagcatacagaaagcggcatggtaaaaacaaaacagtatttgaaggcctgggctcaaatccagctacactgaacatttccatgccttgggattttatgacccagtaaaatttctgggacactgacctagggttactaactccttattttgccaggtaaagaacattaacaaggaattacccatcaatatatatgttaattttattttttaaagacattttcacttcagtgaaaaagaaagagcataatctcagaataaaagaattttccaaaggaataygtatagtttaaaaaaaaaatctcactgcatggtccatgtacactctgactttgacaaggaccactgagcattctgttgggcaagtaccagatcttagagtggcatttggaaaccactgagttctgtcagcttgtcaagggcatgactgccaatgagtaacttaagttgtcagggcctagttccttatgttagaatgggaatatgagcatccatttaatgcagagttgtcaggattaaattcagcatgttggtagaacaccgtgtctggtgcctagtaggcattcataaaacacattgctctcctctctgtttgatcaagggcttccttttaatctattgaatcttttcaccacatgcagacctttaaaattgttgcactagttgaccaaaaatcttttccctaggatcccattctggtgaaaaaccaaaagggcagggccactggcattaagaacaagcctgccaataagataaactgtgaaagaagatcccgttcctagaacacaaagtgagagcacttgtgaatccctgcccatgtactcaactctttcgctgtctttcttccctccatggaagtcagactctcagctttgtactcaaaccttctggtgataatttgggacatcagccgtcctagaaaagtctctctattgtattggtttttrttaaacaaaataacctaatatgcttagtgaatatgtctacacacatgtgctaaacatttgtttaattatttaacttggaaaattttggtgtatcatttctaacagagatagtctttgtgccatcatataactaacaaatttgaaggcattcattggcatcatgtattttctctaatgagtcctaaattgttttctcatgacaaataaagagattccattttagactagattattttttgcttatgttgcrtaaacttcagtcccatctgctttatcatcagtgcctgtcctccacaagtgatatgagcacacatgagccaaaaattaaggatttttggttgaaagattttttttttttttttggtcaaagatggggccgggctctaattcttgttttaaatttatttttcatcaacaaataacaaattatatgcatttattatatacaaggtaatattttgatatatgtatacattgtggaatgattaaatcaagcaattaacaggtccatcacctaacaatttatcattttttgtgatgagtacatttaaaakctactctcagcaattttcaggtatactatgcatgattattaattatagtcaccagcctgtacagtagatctcttgaaattgtttctccttctaactgaaactttgtaccctttcaccaacatctcccattccacatcctcccattctcccccaggccctgctccagtccctgggaacaactgttctactctctgcttctataagtttgattttgtttttagattccacatatgtgtgagatcacatggtatttatctttcttgcctggcttatttcactaagcataatgtattctaggaacatccatattgtcataaatggaaggatatcccctttttaagcctgagtaggattctagtgtgtgtgtgtgtgtgtgtrtataacattttctttattcatctgttgttagacacttaagttgattccatattttggctattgtgattaatgctgcaccaaacatgggagtgcaggtatctctttgacatactgatttcattttctttggatatatacccagaagtagaattgctggatcatatggtagttttatccttaattttttgaagacccttcatactgttttccatagtgactgtactagtttacattcccaccaacagtgtaaaaaggcttccttttctccatgtcttcaccaacatttgttacctttttttgattaaaaaaaaactattataggtgtcaggtgatatctcatcatggttttaatttgcatttcacttaagattagtgatgttgagcacttttacatatacctgttgacctttttttgtaggtcttgttttgattttaatttttttgtagagaaggtgtctcacgatgttgcccaagctggtttcaaactcctgggcttaagctatcctgctacctcagcctcctaaggtgctgggattacaggtgtaagccactgtgtcaggccattgttttgagaaagacctattcaggttttttgcccattttaaaatcaggttatttgtttttttgccattgagttgtttcttaattcttaaaatattaataagatgtgagcaaacagtttaaatttcagaaaactaaatatctttgaaggtcactgtactagtctgttctcatgctgctgataaagacatatctgagactgggcaatttacaaaaggaagaggtttaactggactcagagttccacgtggctggggaggcctcacaatcatggtggaaggcgaggaggagcaattcacatcttatgtggatggcaacaggcaaagagagagagcttgagcaggggacctcctctttttaaaaaattagatctcataagactcattcactactatgagaacaacgcaggaaagaccagaccccctaattcagtcatctcccaccaggctcctctcaggacatgtggaagttgtcggagttaaaattcaagatgagaaccccatctcaaaaaaaaaaaattctaacctgctttaagaaataaaaatagtggtttgcacttgtaattccaactgcttgggaggctgaagtgagaggatcacttgagtccaggagcttgaggctgcagtcagctgtgaattgtgccactgcactctagcctgggcaacagagtgagaccccacatctctttaaaattttttcaaaatatttaaaatgatcaaaacgggcgaggcgctgtggatcatgcctgtaatcccagcactttgggaggccgaggcaggtggatcacgacgtcaggagatcgagaccatcctggctaacacggtgaaatcctgtctctactaaaaatacaaaaaaattagctgggcayggtggcaggcgcctgtagtcccagctactccagaggctgaggcaggagaatggcgtgaacccgggaggcggagcttgcagtgagccgagattgcagccactgcattccagcctgggcgacagagtgagactccatctcagaaaaaaaaaaaaaaaaaaaaatgatcaaaacaccagaaaagctgcatacacagatatacaaacaggtggcctgagtttggcgttgaaaagtttcaatttggaagatgttacctcacacaatactagacagctttaatgttactcatatattaatttacattttctttgattctcagtaaaaggttgctggacattcttgccaaattgaaagttttggtagttgtgatttttaatacaagtttttgtgttaaatagattattttaattctaagtggcaatagcttcaaagaggaaaagcacattcacttgtaactgaagttggctttattatattaggaactttattccctagggtttcataaatagatgtactgcttaatttattttgacttaaatggagctagtttcaaattaaaaggccaagcaatacagaggatccatatcctcaagtatgtctaataccaaggaaacagtttttatgtatttttggtattgttttatttactatatagattacttagagtttataaaaaaatctaatgcctcctttataagtaattttaaatcattcattatattcttaaatttataatttgtcagagtgaacattatttttggaaaaacaaatcatctcttttaaacgctatatggaaaaaataatttggttttgcaaaattttcttggtagtcacattttacagaatttttgttgtctgaaattagagtttcatgattttaatttaagcaggtagcaatataaaatacttaacattcccatgaattacctgtgcagcccagtttctcatgtagcattttaatatttacctttgtcttatgtatatttaattaaaataagcatgtttcctttaataagtagctttttaaaaatgaatgaatgataaatgaactgaaattcgtctgaaaaacccatatgattattttttaatttatttaaaaatagaatcaatgcttacattttaatacatttggattcacataacttgaaaaattttagagattaccgaatatagattggaatcattaacaatattttaaaagaataaaggcatgtataatttttatggttcattaatgtttaatgctaaaagcaagatatacagttgaatatacactatgactctaattctataaggaagtatgtagtccataatagtcacatactatattgcatacatgtgctcacatacatgcagtgggaaaatgttatcaatagttatctttgaatggttctttaagttgttctatatctcccaaagtatgtatatgtatgcatgtacttcatatgtgtgtatgtatatatatacatacacatatgtatgtatacgtgtatctatacatacacatatgtatgtatacgtgtatctatacatacacatatgtatgtatacgtgtatctgtacatacacgtgtatgtatacgtgtakctgtacatacacgtgtatgtatacgtgtagctgtacatacacgtgtatgtatacgtgtagctgtacatacacgtgtatgtatacgtgtagctgtacatacacgtgtatgtatacgtgtagctgtacatacacgtgtatgtatacgtgtagctgtacatacacgtgtatgtatacgtgtagctgtacatacacgtgtatgtatacgtgtagctgtacatacacgtgtatgtatacgtgtagctgtacatacacgtgtatgtatacgtgtagctgtacatacacgtgtatgtatacgtgtagctgtacatacacatatgtatgtatacttgtagctgtacatacacatatgtatgtatacgtgtagctgtacatacacatatgtatgtatacatacacgtgtatctatacatacacgtgtatgtatacatatatacatacacgtgtatacttatatatacatatacgtgtacatacatgtatgtctacatgcatgtatgtgtgtgcatacatgtatgtctacatacatgtatgtgtgcatacgtgtgtgtacatgcatgtgtgtacatacgtgtgtgtgcatgtatgtatatgtgcatgtatgtatgttgcatgcatgtatgcatgtgtatatatgtatgtatgtgcctgtatgtatacatgtatgtatatatgtatatatgtgcctgtgtgtatatatacatgcatatatgtatatatgtacatgtgtatatagatgtatgtatatatgtacatgtatgtatatatacatatacacatacacacacataaagatcaagtaggttacattatatgtttgttttatatgtccatacttctatgaagatgggtctagagagttgtgagtagacgtggtcctcctatagctaatccttgggtgttgtcaaatagtctaggctcccagaaatatttttatattcattttaaaattagaacatacttgtttctctataattctaaaagaagttgtcaagggtgaattgatagatggatgatagtttttaggctgaggaaagaaagatactaagatttcaaaattatcaaaatcttggactttaaaatatatttcaaaaatattattttaattttctatatgtttatcaatttcctaatcctattgacaaacttcagaggagaatatctttctagtaagagtgagtgaagcacagaagatgaaaaaagtttgcacaagattccattcggccagcgcggtggtgcacacctgtaatcctaggcaccccatagactgagacaggaagatcacttcagcccaggagttcaaggccagtctgggcaacatagcaaacctccatgccattgaaaaaaaaaaaaaaaggattagattcaaacgtaagccccagcctgtgactccttcacagtgctagttcatgcattcatttgtcatgctaaaatttgcaatgtgtgatattcaaaagcagtgggtcttacatggccactaatgctttaaatatagtaggattaggggtctttgctccataaagtaaaaactttcttctaattaactgtatctccttttccttatgatttcgtaatagtaaaacagataaagattgccacctagtgtgtttaagatttcaaccaatcatgaaatgaacttctataggaaattatattttcaggtgctgatgttggttgaacttatttttttaagatgacaacaggctttttcatttttaagtacttgaaccatatatggatctcaacaaagtcaccataagagtgtgggcatttggatttcttgcttttagtttcttgcttgtttctgtttccttattacagaaagaaaaagggtagaaaataacgtgataaataatacagaagtagaagaaggatgggagggggaatagagaatagaagttcctgactctactgtcatttctcttgtgagaaaaaaaaagacaatagtatactgttgagccctgtattctcctgctttcaacagcgctggctcaggactcagcaagtctttctctttgggagagacaaggctcgccaggactagtgaagatgactctggttcacttcctggtaaccagggaaggtgacagagcatgtggcacctccttggacatcatgaaatttaaaaccaatgtgacactgactcccacagtgacctacagtggctcatcctggctgttctagaagtttctgcacttgcattctgctgtgactgttaccttggtaccaatctcatctctcacatacatacatatgtgcatacatacatacatgtatacatgtgtgcatacatacatacatatagacacgcagtgtcaaaatgactttttttctgagccttcctatccctcattcattctccgcctgtcctccatgaacactccagttcttttttttaaaagagctgtattttccttaaaacagatcacagctgttttttgttaagggttgttgttgttataattgtttttatttaaatgaaagacagtattgcatcatcctcacccaaaattcacattaccaggcggtacaatttcaaaatgtccaggcgatattcactgtgtgactttgaatctagcttttcagtcactttatagagaccctaatagtctcttcccatctcagaagagactcagaaaaatatttagccaagtaggcctaggaagccccaatttattacattgtattgtaatccctcccagccccactttacgtggcaaggcgctttaaaaagcttctgtgggtaaagttgttcaggtgcaagatttcagaattattttatttcataggatttttttgagcatatgtgattattcagttcattaaaacccacacatactttaaaccaaatcatattcacaaagtgaatcttctgttgatcttaactaccagatctgtttttaaatgattataagcaaagtgtaagacacaattcaaagatatgtttgtattatatttattttcttctaaccacaaataaaaataggttttacttgccttattctcctagtgacagtatgtctgaaaagatctgttttaatattgagttgaggacttagacaaagattttaaaattatatgttaggtatatattcaaagataatttaagcatgacatacttttgaaaataaatggataggctataacctgccgtttatcgaggacatctgccactgaaatgctaggtatcattttactgttactaaaatgagaccatcttgagatatttggcagaaacaatttctgggcaatttattaaaaagtaatatatttccttcactaaaatgataactgtctttatgctttcatagggaaaaaaggctggtaaattatcataaatattgtaaagtgtattacttataatacttataaaggagatacaaccaaagagaaaattaaatgttttaataaatatgcaacccttttgagttttgaaagattcaaatccactgcaatctatataaaaaattaggagacatatttccatggattcatttcagattgatgatgtgccttgtcaagatgacttagtcctgaaaaaaataaactttatagtaggtcaattataaagaataaaatgaaagaagagactatagcttgggacaataagaagatgtcatattattttaattttggttatctgaactgcctctcatccattttacaatacaatgtcttcagcttggccatgcactgaagcagatgaatagtttatcagactggcaaatcaagtcggcataggtggcatgtcttttctccttgtgtaatatacctcccattatggaatttttaataacattttttaatgtcagaaaccattgaactatcttgaatgcaatatatgtagtatatacacctattgaaaatgttttttgtcttcggacttctaacacactacacagtttactgatttgtccaccactcccaagaatgtttggcttcaaatgaactctaaaggtgcctttatgtgtgtagaaatttgtcaaatgctgaagtgtttagctctggattttgtcttcatgctttttaaacactggtgtatctgtaaatatttctcagttgttttgtgagagttaggctactgtttcaaaataagtacataagagaaattgcagccctatatttacctatatgacacagccagaagggaaagtcagaatgatgggccaaggaagaaatgtagctggccaaccctggcatcactttgtaatttgcatttattgggccattttcctagagctttatttttaatctttttaagctgttccataggaatcagccaatgcatatcacaaaaggggaccattccaggtatggctgtgcagcttactacctgcgtgtctttgtgttaaatctcttaatcaatttgagctacaattttctcatctgaaaaatgggagtaatgtcacctaccttgcaacattgttgtaacagctgatgattgtatataaaatacacttgctgtgataacattctttttacttttgtaaatgcttgaaattttcatatctttttttccccagaactttttctttcccccagagcttttaatgctgtcatcgtccctctctctctctctctcaactaccactgatttagtttaggtcctcatctcttcttttctctacactggtctccctgcttccatttttgcccctttaaagccctcaatcttttatagacctgtcacagggtctcaagagtccttcttagcgaagtatcagttttctgagtctttgcaatttcctgactgcataggaaagcaaaaatcattatgatttaaaaggttttactactgctgctaattattattatagaaatgtttattgaacatttactgtgtggtaagcacatttttcagcacttaacattattaatttattgaatcccaaaacatcactctatgtatgtgctgttatctccattttacagatgaagaggccaagggaaagtgaagtttaataacttgcacaatttcacacacctagtatgtggcagagctgaaattccaacccaaacttccatcagagagtaaaatccaagttcttgtacatttcatacaagggctctgtgatctgctgcctggctcgttaccacccatgattctgaatttcctgccttccatggcattctctagaatcaccgagcttctcgttgcagctctgtatctgcttctttctcatctaggcagctgctctgcctccttggcttcatccctctctgctggctcccacgggctcaatggcctccttgccacttcagtgcaccaggcctgctcctaccctgggccattgttctaggaaagagcctttctgggcttgacctcagaagaccttttttttttgagagtcaaggtaaattatgtaaattatttattgatgacagaagaacactatcttagtccagtttctgttgctataacagaatagcatagacagggtaatttatatagaaaagaagtttatatcttacagttctagaggctgggtagttcaaggacatggcatcagcatctgattaggatatttgggatgcatcatcccaaacaatggaaaaatggaagggcaagtgagcacatgcaaaagagaaaacatgaggggctgggctcactttataacaacccactcttatgataactaaccccctcccaccataacagcattaattcattcatgagtgtgaagccctcctgacctaattacttctcacaggcccccacctcttaatactgttgcaatggcaattaaacatcaacatgggaaaatacctttttcaattgacatcctgcctctaccacttattagtttttagaccttatgccctctctgaacctcagttgcctcttctataaaatgatcataaaacccaatgtcctaccttcttagagttctagagttctatgaataatctctacaaagagcaggtgccccttgaaaaacatgattctggaactaagggggtgtaaaataacacatgcttcctttacattgttttttccttcttctgcttttatttcccacatttttattttcaagatctccacatggtttgatgacgaccacagcacctattctagctattggtaacaatttattgagtaacatcatccatatgctccctgtgccccagcatgtttcatgggtgttgttttgggtcactcaggttgttttcagattgttcatgagtgagcgaaaagtttatttgcactgttctcagggccatgtccagggagctgtctgtgttgaataacagcattcacttttgatttaagaattttatctagctagatcaagaaatagctgatggtgactctggaaatccttgtctcaaattattcatgctaagaaataccacaaaagaaccctgggccccagtttctcactttcctctaactggaatgttgcacaactttccttgcccttccctgtccctccaagacacgtcatgctgacaccttgctcccataccccaggcacggtgtagctggggttgctgcagcaacagcacacaaggagtaacatttcccagtgactacagtggctgggatgagtcagttgaacatttcactgggtttttattagtgtatgatgcagtcccatgtcatctacagttcctagcctgtccaagacttacacgggatgatgtggaacactccatgctaatcaccttcaaatattagatggtcaagggttctctcactgaagtcactgcattgctggttccttccacagcaccccttactaatatctacagtaagaggccaaaagtaaaactcaggccccactgctggaacaccatttctactattgcatatcctgtgtgcctaaaaagcaacagtgaccctggctgatgatcaagaagcccctctttttacccagggagttggacaattgttaacatcccagaagacatatttttaacccagttgctgggaagaacatgtgctgaagtataaggatggaatcactgtaattctctatgggaactcatgaaagtggaacttgccgtttaatattgaacgacactgagcacagagttattgatgatttctaatgcgggatttggtttatttttcagacacggagatgacttgattgtgactccatttgctcaggtaagcacagcttggtgaatgggcaggtttctcacagatgtaaaaatttaatttggggaattagttcgggttattaatttaatttaattttaaatcaagcacaagtacaaatacaaattcttggttcattcaagcaattcaaaagcaatgctagagaaagtgactttggctatattaatctgtttcctataaacccatagtaccaaagagtgtctttgcttcaaataataaattagctaagggatatacttaattgggctcatactgacataagcactagaagcagaaggctatatcatggcttaagttatgtttagtataattaggtacatgatcagtgcttgaaattcaatattccaattcaacccaataccttatttatctcttttttacatatgccatttgtgcagagatttagctgagtgatgtgttgatgtttacttcttccttctaggcatacaaatcatgaaaatactttaaccacatgacatatgtgcaagcaggtgataacatgatctaaaatgtttgggaatataaatatgaaagagttgatgaccagatgttctatgtatagaccaatacttctcaaccctacctgcacgttagattaacctagagacctcttatcccagtgcccaggctgcagccctggtcaattaaatccaaaaatttggagatctgttacaagcatctgtatttgttaaaggccttagtatttttctagtgtgcaggagaagttgagagtctctggtatagacaactaagggcggaatgagataaaactgatttaacctggggcatgaagcaggtttaaaaccaacactgatgagtaagaaatgttaaatattaaaatgcaagtaatcctgagaggttgtaaaaattataatcaggcctatatcatacatcaaggtgctcttgcaccttggacaactcacttaaattttctgggtcctcttttttttcaactggtagagttaggggactgagctggatgaaagacagtcagatctagttaaaaccctttcaccgcctcttgccaactcaatggacttgagcgagtcactgaacttttccaagcctggtctcttcctctgttaaataacagttccaagagtacccacctcataagattgctaagacactgaaataataccacgcttataaaatgctaggcacaattgcttgaaaatataatattataaaaactttgtgattggtttaaatgtatagagctgaaaatgttctttcatttctaaaatgtcataagtattattttttaaatggataatagggtttagatagtaggattatgtatagttctactttttaaaactttccaaacttttattactgtaacttagacctataatataatcaattcataagtaacataatgtataatagtaactttttaaattaatgcaggcaattaaaaataaaatacaatcaccatccttttcagatggttaatatcttgtttgctgaaggttttgctggagattatgaattctttctagtacctgtatttctgtgtccaaaaaatttacacttgtatgatttaataatatgatgtgatagcaaaatcttataaagctgagggtttttaattgattactattgaaaacttatggccgggtgcggtggctcgtacctgtaatcccagcactttgggaagctgaggtgggtggatcacctgaggtcaggagttcgagaccagcctggccaacttgatgaaaccctgtctctactaaaaatacaaaaaaattagccaggcatggtgacgggtgcctgtaatcccagctacttgggaggctgaggcaggataattgcttgaacccgggaggtggaggttgcagtgagccaagatcatgccactgcactccagcctgggtgacagagcaagactctgtcaagaaaaaaaaaggaaagaaagaaaacttataattctatatctaagacctcagagagaggtgaacagacaaaatatggcataacaatgtaagtaacatcatcaaacatagaaccaatcattccaatttgagttcattcaagtagctattcttgtttctaaccaaatgatctaggtattattataagaaaaaatatatataaatatttaataacaaatgaaaaaaggtctgtgtatgatatatggtcttttacatcaagtaatatttattaagctgcaacaaatagattagtaaattggacttgaaccctgccatcagtgctcttaaattccaaggaaatctagtcttttacctgattagatattttctgtagtgtacctataatctccaaggaaaaaaaactaatggaatttcaagatattgggaaatacacacatatatgtaatttagtccatgttagtaagctatttaaataaaaaagatgtgtacttaatatacttgaaattagaacttggaatataaatcagctgtataatttataggcatatctgatgcctaaaaataatcccatagtatattaagtctttgcttatgattagctaagtgactcataacaccttgtagagagtggtcattacttgagaggctgccgattttttttaaggggcttcatcatggttttcacaaatggccttttactggagtataagacctggaaagccccactagaattaaaaacaaaacaaaacaaaaaactgttaagccctgaagagtttcaccactcttcatagagcatctgtggggaggggttaagagagaagtcccagtgagtatgtttgagtggccttctcttaaaccctgttggacatgattggcatgttttgctgacccaatcactaacttctcaaattttctttaatacaaagtaaagcacttaccacttaatggtaagtgctattttagcattaactatttaaaactaaaaatataagatacttatgtcacttgaagtgataccaatctaatttgtcctgatataccataattgctttcaccaaaggacagaaaacaatggattttagaaaagtcactcagaaaaatatttagccaagtaggccaaagaattaccctcttttctcagcatgctttgaaaattggaatttcacactaaattccagtgaaaaagctatgcttctcaaaaagacaaaacaaaacaaaaactttttgcataaaagtttagaaaaataataagaaaaagaaaaggaaaattttctaaaattccaaaccccaaaataactgctactgacattttattttatatcccttcagatttatttttctgtgcatattttctgtcccatggctcctaaaaatggccttcccctgtctaaggtgttcaaagatcccctcccaaatccatctcatcttctgcctcttcttgagaactcatttctttatgcctgagtccatctccaaaacacgaatcatggtttccaaatcatggtttcctttgacgtgaaaagagcaaaatcctaaattagaggagaatttaggaagccgtgcaaagatagattgcacttttttggccaggctaaagcctgaaacatcttggatagtaattttcagaaaggatcctatagtatctctccatagtttatcccattgtctaaaacactgtcagggctagaaattcttgctggtgtttaacctaaactcttttccacctctgatttcttatgctttcccctgtaagctcagaatccctttggtcctcagaaaaagtgacagctttaaatatttttcttatttcaattgttaaagtattctcttgtgtttgtgttgaaatcttttggtgtgggtgtttccttagcacgaaggctagagaggaatcccactggagtgcacgcggcaactgacctttttttcttggccagagttcttgggggccaaggagcactaaggaggcacaatgctgataaactgtaggaaactcttctctgctgtcagctgcctccgggctcagtgatcccaggatttgtgacacaactaccctgtagtaaaactctaagttgactagaattttcatgtggaagtgtgtaatgttaaatgaagtagactctgatgaaagaaagagaaaacaggaaaacccaagcattatgctggatccctggagaaaccctcacttcattcagactaaggagatatccctgatttgaaaatacagaggcgggagaataacttgaacccaggaggcagaggttgcagtgagccgagatcgcgccattgcactccatcctgggcaacaagagcaaaactccgtctcaaaaaaaaaaaaacaaaaaaaacaaaaaaaaaaacggggtaggaacaactacatctctttacctttactctaaccaaaatacagcacctgggatacttctaggataaaaatgcagtagttattaatactatagaatattaccatttagttggtaataaaatataaccaatattctcatattcctgcctgtccctcagccacttcacccagcagcaacgatcttgtggcctcatcaccatcctcaagcttgcagactgtgctaggccctccctgccaggctatgaaagaagatagtcacctcgtttcagtcggtgctaaatttttagcttttctttagccttaattaatttaaattacaactactatcttctggacatctaagttctttttaagagcgaaccatataaaattgtctatcaaccttttctggtgtacaaaccagcaatttcatagggtttaaacaaaacataacctggaaagaggttttcttttcataaaaatgacctttctattttgtaaataagcataacttgactccagctttttccggaggtaaaaccgaagtaatgaatctctcccagtgcgggtcgccgcttcctccgccgccagtggcacctcaacctcatggtctgtgttttaccgccatctagtggtaacaagtgtatatggttatgaaaaacaatcctcgaaaccatttattttcctctttttttttaggctatgatgttcagctgtttaagtgttaaatgataaccgtattttcctgctattttcagtgattcttattgtttaataaatgtttagaagcacctaagaagatccgagagtagtgtacgtaaataacattgaatccttccccatgggctaatacatgaaccatctttgtctaaaatttttctgtaaaactaccagtatttccttcctaaggaatatatatttctcatcattcccaatgtaattttgacattgactggctatacttctgcttggtggggcagaagagaaagaaatgaccttaattttctaaccattgagctctgtggaagaaacgtcagggatctttttggttagcaagcattaaggagtaaggacaactgtaaaaggagccttaaagctttgactacagttcttaaagagtcgaattcaggggaagtgagggctgccctgaacaaaagcaaagaacaatggaactttaacttaggggcttcagtaaaactgtttatagttctccccacagcctgcagtaacagatgctccctctttgtgccctgcaatgcaaagtgaaagcttaaaagactaacacagtgataacagtgatgacgacaccaagagtcagtcagcgaggcccaagacaacacccccttataagatttgtctagaaatgttatttacacttctgccaatagcatacatgtcatactgtagaagataatagttaacaccaaacataaaatttataaaatagtttgtcctgctgcaaaagaaaaaaaaacccacacacacacaataaataatctaatactggcatgcctaggaaataatttctctacaagattatttattgcaacagtgtttgtacaaaaacaactttaagatagaaaacctaaaagttgattgctagtggccaggcagctgattgtctgaaggagagaccggaagacagattccttttttcactttttattttgaagtatttcatatatataagggaatatagcttgtaattatgtaaaatataaagaataatactaaaatgaacagtttaagaaatagaacagttatcagtattttaatgtcccctgagtgtccctccccaggttaatctgtttctattgcgtcttttcagaagtaataataattttgatttttatcttaatcattgaaggggagactttttgctttatactcttttgtttaaattctgaagcatgtgaagatataaattatacaaaaatacataaattttaaactaaaaacaaagacaaaataatattaaattagattacttattaaattagaagtttattataatagaggcaaaaactcctctacagaaattttttctttgatgaactaatttttcttttcatgactgatgtttcccttcaaatgatcatagaaaataagttgcctgcatttctatgtctatttacccagctgtcaactgcaatgaacttaactattatgtattggaataaaaatctcagaattctagggttaaaaattttgcctaggaaggggatcaattagctggtgcaatgattttatcttaaagtttccattagtatgtttgatattcacttcttaaaacataaattaagcctgcatgatttaacgacagtggatcatttatccgatttacttctgcatcattcaagatttcatgcctaatgaaagacatcgtggtctgatgtcagcagtcggccatttgaatactccatcataggcagcgtgacctttcagagccgtgggttgtttatatgagataatgagccaggtttttccagtgactgagttaatcacggttggcttcttaggaagcagcattaactcctttaggggaaaattctctaagtcactgtcccaaggcgtacacagctctccattgacttacacaaatgaatgtcaatttcataaacagcaacaacaaaacagagtctgggacatttttgtcttagaaaaaaaattagactgattttagtctaggtctgtgccagatgaaacatttctgaaaacaactctggaaactttgaagcaattaaaactttggagactcttgaattaccaatgctaggcattaagtaaatttcccaagtgcatgccaagtcattaagtcaaaggtaacgctgccatcatgggctaatattggctgaatgctttctatttgccaggcactgttcttggcaccaaacctgtcattccatatactcctcacaacaattctacgaggtaggtatcactatcccagttttccaggttaggaagctgaggtacaaagaggttgcatatctagtccaagttcacacatttactacataacagagccagacagtctgggttgttaggtaatacctactcagacatttggaatctgtgttttacataaacttagcactctagctgtcacccaaatcacctataatcccatctaatatgggtttgaccctggggaaacttgcccatttcaggagaaagagaggagggaagaaggagataaggctctaggaaccttctcctaggctcacttccagtccgttggctactttctagttccaactggaattagaaaaagcgactgttagagatagtgacacctattggtcctgccttgttatgtgtgtgggcatgttgtgtctatgtattcatttagtcaacaaatttttattgagtatcttctgtgtgccaagcattgtgcatgtacagggcgtagcattttacataagaaacgcatccctgagagcttcttacaatgcacaattcagataaccttaacaaaagaaaacaatgtctgcttactagctagagtagccatgtggcaaaggtagaaaaacagtttaaaattcacttcacttgccaacttattattatgagattcttcatcaatttttgaagagatttgggagtagggaattttttatccctaaagtgagctttattagcattttatattatactatttgaaatgtgcaaaaatgcaatcatgttatctgtgtattgcctggaatattgtcttggtgactaaggaacccagaaatactgtggaaactgctgctactgtcaccatgtgcatagacaatgtggagggatttctggaaaatttctgcagtctggcctctctggatttcgtgtggatacctacaaactgcactaagtgttgggagattctttagtggtatatgaaactaagttgcaagcaatatcaagttttctcttaacaaaccattttcaagtgtatttaaaatggccttagctcaagaagtttcaagaatcctttcttgttgtaggtcttggccagtctgcgaactgtacgaaacaactttgctgcattaactaatttgcaagatcgagcacctagcaagtaagatatccttttttcccccctcttttttgctgaacttttaaataagttttctcaacttgattgagcccaaggcaatatgttagacttctctgtgttgttgccatgttgtctgtgtatactaagtcatatgatgtcctgttaattttctataaatacttcgtggtgatggttctaatatcagaaatgaagcagtatgacaaataaatatggtgattccatctgtcagaaatcacctggcatgatcagtcctccgcccagttatttacactcagggtaactttatagtttcggcttacttcataaattaaccgtgggtgaataatctcatcacaccttaagatcagctgaaagtcatcctctcaagacaacgatgatttggagaagcgccatatcatagcaaagatctttgattctcctgctgttactgactttcagatcagcagcattcatggagcaattaatagaattgtggtttatatgacaacagggaaagcatttgaaagatgggaaaggattatcatttcaggttcttgataaaggcaaaaaaatctaaaaagataaaagtaatttttcaatattaaatggaaaactggtttgctgttatttcaatgtccatttttttaaaaaaaatctgctattaatatgaaataaaatattaaaatgccaacttcaaataattttccagaaggaaaaaaaacatttaaatcatattaagaggatagtaaatataagtgtattaggaactataacttacctaagtgcataacatttcatagtagttactacttcttaaaaacaatgagaaatctgaactttacatttcatagtaataaaattgacctcccagattcacgtttttcattatcaaaaatagctctggccgttattcaagtacttcttgtgatagaaaaaagtttttaaaaatcaatataaatgtaacaatgcaagctattggaatggaacccattaggttctgtttttccaggtaatgaatttttgcagtcctattctctcagcctgaatacttctcatcttcttcttcctctcctcatctactgggataattgtcattcattcttttggttgcagcttaaataaaatttctcttggagcattgtccctgatgatacccaacatagacacacacccacaagccctaatcaaagtgatgtgcctttccatctctgtctgattgtaccttgtacttgattcctatgttagcacgtagctctctgtgctcctgttgcctgtttgtctgttgggatgctcctgaacactgtcagttcccagtgagtaggaatgtagtcggttcacatttgtattccctgtgcctagcataatgcagagtctatcagtctgcaaaggcctgttcgctgaaagggcaaagtagtaactcagcatgtaaaatctgagggcatgctttgaggtacctgttcattaccaatcacgttttctatgtaacgtggccgtgcaatgtcatactgacctcagcggcccccttgggctttggggatttggtagcttgtaaggtcaatcacctcccccttagaaagtctcagctctgcagaagaaatgaagttaactggttgtcactcccaaactttttagtctcgaattttacccaggaaactgagatttttgtctttaaaaagtgaacaagaaactccctttatgcttcctttacatgtggtcacctgggtaccagcatttaaatctgtggcaggtaaatagttgatcagtcaggctccagagacgatctgaggcctgtttctatgcaagacagaagttttcagctgacatacagggatggaacagattgaaatggaaaggaggagctagaagaaaacagaaaatcatagcttgagcctgaacttcctctctgccttgtcaatgcccagggtgacatctaaccaaacagtattatctggcagactctaagtaaaggccactgtggtcttccttttggtcaatgcaaatttgtgcctccattactgattcaaaccaaatcggcttctttgggtatcagaatagtaggattcaatctattcacggctaaactcgattctgttcagtgagaacaaagtgctgtaactctgcctcatcacatgatgaccctgggagaatcagaacctttcctgctgggcactcacagagccactagaacatttccaagctcatccttggattttatggaaggcatgtgctcctttgcacaagccaccctttttatttgctgcagaaaaggagtctaggaagaatgcattccaaacccagcccctgggtgggtattcagatgcacattgctgacttgttaacacattactgcttcttgtcaccttgggttttttgtttttgttttgcccttgagattttttattccagaagtgagttctggctcatctgtcattagaggaggtatcgaggcaaccatggatcaaagtattaatattttctgcttgccattacttgttcagatatcaagttcctgagtaccagttaattgtaggattgatagtaaaaggagataattagaattgagtcaaccatttggttttccaaaactgtagaagagtgtgaaaatatttatttaataccattcccagacaaaatcaatggtttctaaattttcacagagcaaggactaaaaaggagtaatcaggatatcaattatttgaatgataaactcttagccagaaggtaacagataacaccctgttacacacagcaagaccccatctctaaaaaaaaaaaaattaattagccaagcatggtggcatgcacctgtagtcccagctacttgagaggctgaggtggtggggggaatcactagagctcaggagttctaggctgtagtgagctatgatcacaccactgcactccagcctgagcaacagagtgagaccctatctcaaaactttaaaaaaaaaaaaatttaagaagaagaagataattactggtatatagaccagagctatttcagagcagctgcttaaaatattaatattttggtttatcgagtttaaattctccccatttttcccccaaccattttattttataactaaaaaaaactaaaataattcagaagtaaaatttggtgcattttcaatcaaacacaaaattttaatcccaaatcgataccaataaccttaggagcaatgaaagggagccagaggctgagtggaaccagtgagaatttacaaaatcccaggctgctttccccaactttcccccaccctgctaagaaattcatcatctcagcaaggcatatttgaagagattgatgccattggcacatatgtgaggctgtgcatgcaggttccacaaaaacatctcaaactaaggcagcaaagcagagcatagaccctaggatcacattcgtttagttcaaatctcagcttcgttacttaaaacaagttcttcaaattctcaaagttttgtttttctcattggtaaaatgagaacaatgaaacttacttccttaaggcttattgtaaggattcaatgagataattcatttaaagtacttatttagcaatgtctgatccacaagaagtgtttattaagtgttcacccttggtagaggcaatatatatataattattatatacctaatatatatatatatatatatatatatatcagacatctttgaatgtatctaaaagtgttttttaatcattatattttaaaagctgtcagttacaagtaataactttataaagttatatttcaaaaatgttgatggatactttataaatgatattcttttcaacataatttattaagcactgacggaatactggatgcattgtgctaggctctgtagggaatataagttaatcagacagcatgctttttttttttacttcaaggggtttatagtcattttgtggaacttggcaaacatctgaaaacttagagaacacaagatataatttatttaagtacctttggcttagagtatttctaaagcttctatagtatctatttggacaagtcattaatatacctctctaacaaatatatcagaggtgtttttcaatataagaaaagaaaggaaaaagttcaaatagcttctctaattataagatagtttacaacaaatcattcacttctgataatgtacaggcaatcacgagaatttaggccaacaataaaaatttcttaaccctgtattagggaagacaattataaattgactgctttttcaaattcagagtctataagctctggcttcagcgaataaagtctgtaagaatttcctcttctctcatgtcccagtgacacttacatcagctttatttaccccaaatcaatcactgtgagatttaccagttttctttttggacatgtgtgatctgagccataatacaaagaacgcctagggacttgtctggctagtctgaaagaaatcatttgcgtgtccaaacttaaaaataattctttaaagtaaaatgctatatctgaaatgactcagagagtgatcaaatcaataagccccacatatttactgctttgtgtttttctgtctttgtcagaagatcacccatgtgcaaccaaccatccatcaacaaagccaccataacaggtaagaaagatctggagcttattcttcatgtgtctaggaagaaaccatttctgccaagagtcaatataacaccaacaccaatttcatgctgcaatttgaaaatgttaaagaaattctttcttctctacattatcatttctatcattgatctcacaaattgtctaagctgttatttggaacatttttaccgatttacgttttttactgatgtacattatttttaaccatttaactatgtgcttatactcatttgagcattgctctgggcatttgtattttgagagatgatgttactttcaagtcacttcccattctggttccacacatgtgttattagcatgatataatatgtcatcatttagtttaataagagtgaaggcataaataaaaggagtaacgtgttggttcatcaatatcccacttgtgtgtaggaagcaacattgtaccagtagtccaataaaggactgagagagctgagaataaactcagtttgggaggggagagaagttaatatacaatgcagaaaaagttcaatgagatcaaaacgttgggatctatagatgtttgggaaagaaaaataggaggaaagatgagaggagccaagtgcataaaaataaaattatctcaattcctattagtctgttttaggcacaggacttgaccccagctgaaccaaaaacagaatgcatgatctcattttgctgaacctgaaaccaaattgaactcttttgactatttcttgaaaccccaattgattcattaaaataattgcctggaaaagaaaacctatgttttctaaaattattaccagaagaaaattagcatattctccaaactaaaacaattcgtcattggattcaagtgtcttccttgagctccaacccataatgtgctgaggagctcttattaagttattagtgagtacactttgcttgaaatttaactttatcatgtccagacgtctgtctgtgtttgtggtcaccacattagagttgattctggaatcattgttaatgtcatcttttctgaatgtcatcaagtgaaacttgtatttcaatgaatgttaaattattgatctcttcttcatgtttctctttcaacatattattggtgatgacttccaattatcattttatagtacatatatggttaaccagttttgttcttgatattgatcaagagatgaacaatagggccaggagtggtggctcacgcttgtaatctcagcactttgggaggccaaggtgggtggatcacttgaggccaggagttcaagaccagcctggccaacatggcgaaaccccatctctactaaaaatacaaaacttagcatggtggcgagcacctgtaatccaagctactcgggaatctgaggcaggagaatcgcttgaacccaggaggcagaggttgcagtgagccgagatcgcgccactgcactccagcctgggcaacagagtaagactgtctccaaaaaataaagagaaagagagatgaacaataacaattcctatatgctaaaataaatactttgagtaactgatttcttctgccaaaattcaaattcaacataaatgagtctaaactgagttggaggtgtggaaccggatccctctgtttctatgcactttcctaagttgaggaatggacaggcctacatttatgaacctgtacctgaggcctctagtgagagaagccacatggaagctggtcttcacgctgctccaggcactaaatctgacccctatcaagaggaactaccctcaacccccaattttgcaataagcaagaactgacattgctatttgggcagaatgcagtgctattttggtccctggaagcttttttagcttgaggtcacatatgagctggcctcacaggtggagcagcattctcccagaagagcagcatcaggtaccagtggaaattgttgtggctgacaacagatggttgggtgctcagtggtcagggcagctgcccagccatcccagcagatgccaggcacagattaacaggagagagtagctacactcaaagggcacacacttgatcttaagcatatgtgacagacctcatagaagctcctagaaatgtatacatagtaagggggtcctggagcaataccagagggaattatgagccacagaaattaagaaattaaggtgaatatggcctcattcgtacccacaagctcctgacctgaggcctagggacaagggggacacagaaataccttatctagaaagggaaactaattaactgttgttaccacttagtgctgctgggctcctcacaaagcacaacaggaaatgaactgactaaaactgggaagtcgtttttcttgcccaagcatagcaaaccaaggtgggaacatggcatagggatggagggatgagggcagtagcaggggaaggttcccctttctgagcccattttgaaaaagtgggcccttaaaacctcagtgctagtaataataatgatggttgagattttgacattagtaagatttgagacactcagaaaaggcagtgcttgtgcctttcctccctctgcagctgaccactcaggccccaccctctaggctcactccccctgaagttggaacctggctgtactgtggcagtagtcctgggaagggcaaagaagtattaaaaagagtcagtgaggcacccttaagatgaatgggtccctgttgataggggtcagacctagtgcctggagcagcatgaggaccagcttccatgtggcttctctcactagaggccccaggtacaggttcgcaaatgtatgcctgtctatccctcaacataggaataaggtctagagtaacagtgtagcctaacagttaagttcatggctgatccaaaaggctgctagagcacacagctccaagtgcctccggagggcaactccacagaacatcacaacatggtgcccctagaattataccacgtggttgctctgcctacccagcactcaaatcatgctctatcatgagagctttgtggccctgggcaggttgcataccctttctctgctcagtttccctacctataaaatagtgacactgcttcctgcagttgttgctggcttgaatgagtgaacacgcatgatgcccttagcatagtgcctcacagaaccagcacttaatacatctttttaaattccattttgttgttattacttggttttgtttctagggcccactgtatacatagaactaggggtttcttcatcaattcaggctgccataacaaagtaccatagactgggtggcttatagacaacacaaatttatttctcacaattctggaggctggaagtctgagatcaggatgccagcatggttggggtctggtgagagtcttcttctaggttgcatcagtgccctttgtaaaggcactagtctcatttgtgagtgttgagtgctccaccctcacgacctaatcacctcccacaggcccggcctccaaataccaacacatattgggttaggatattgaaatgaattttaggggcacacaagcactcattccgtaacaagggggtaatggaaagaataggacaaagacacaaacgaaggaaagggaacagtgagagaaaggcaagcttgcaagatcatgagaggaaaacttgtgggtccttaaattggccaaaatggatgcgcttgctttgtgcccatcaaaatggggtctcctcctgctcccagcactgtctcctttattctcatcacaattcacagacgctggtagctttgtgatagagatgatacactgttgttcaggatgaatttctaagtctaagaactcacttttgagtcatagttgtttgaaggagaaatattaattctctatcacttttctgtaaaccaactctaatttttaaaaaagaagagttaagaacttcagcagtctacatatcacataccatgctttctaaggagttgtcacatagaatttacaataccctcttcctcttttcaaggttattgcatttgacatgtattaaagccaggagaatttgatttttttttttttttcttgagatagagttttgctcttatcgcccaggctggagtgcagtggcgcgatctgaggctcactgcaacctccgcctcctgggttcaagcaattctcctgcctcagcctcccaagtagctgggattacagatgcccaccaccacgcccggctaactttttgtgtttttagtagagacagggtttcactgtgttagccaggatggtcttgaactcctgacctcaggtgatccacccaccttggcctcccaaaatgctgggattacaggcatgagccaccacacctggccgagagtttgattttatagcattagggttttaaagctaggttttaaaggtaggtcactggccagtttttatttcaatatatagtaggtaaacatacaggtctaaaatgatctaacaattccttaaaagtaaggctttgaagtttgcatttataaaagagacttaaatagctcttttgctctttagtgtgatatgacaaagatgatgtgtggcatttggagcctgaatgtgaacccagtctctcctttttgcttcatttcctcattttggagatttgagtacctaacacttaggactgttgcaagaattcaaggagataagttatataaaaggatagagttcaagttgggcatggtggcacacccctataatcccggatattcaggagaccaaggtgggaggactgcttgagatcaggaattcaagaccagcctgggcaatgtaatgagacctgtctcataaagtaaaaaaaaaaaaaaaaaaaaaaaaatggagccgggcatggtggctcatgcctgtaatcccagcactttgggagcccaaggcgggtggatcaccaggtcaggagttcaagaccagcctggccaagatggtgaaaccccgtctctattaaaatacaaaaattagccaggcgtggtggcaggtgcctgtaatcccagctactcgggaggctgagacaggaaatcgcttgaactctgagggcggaggttgcagtgagccgagatcaggccactgctcttcggcctgggtgacagagtgagacaccgtctcaaaaaaaaaaaaaaaaaaaaaaaaaaaagaaagaaaaatggatagagttccgaatgtgatgaggaactcaccaagtgtttcttcctataaccctgtcccaatgcctgacatttttttgttcctaaagctaatttaaaaactggtagaatagaggtaacagagaatattggtatgtcagcttctttggtacatttcatttatgattttgttttcacacagtcatggcatgacatttttagtaatccttttatcatttagagtaaggctcacctacatacgtccttaatgtgtggtgcacaccagaagtaaagagtgcattggaacatgagagggtggcaaagagtcagagatgcccaagccatacctgcactgggacagtgatcccatttttgaagtacagccatgtagcttggagcacagtccttccttgtaagcatttcattttcgaacaaccttagctcaaggcaagcattctgcagccatctcattaaatgttacatcttcacaataccattttcaatgcttctgaatttccatatttccaatatgtttatttaatcatcctcaattagaggattttcatgcaaggacacaactctaaagaaaacgtatttaaatatctttattttaaagatgaaaaaactgagacctagtgagagagggtgctgcttagtgacaatgccaggaataaacatgtggttcctttttcgagtccatggtccttcttacacctttataaagtaaaataaaccattagattcgggtggcctttatacccaccgtggaagtatatgctttagagaaagtaaatgaagtattaatactaactcctgagtaatagatgtggcattgtattatttgtatatgagcttgaaaatttctcatcccaacctctcactggacatatctctgtagttatagctattttgattatatctactgcttataccccagaggcatagagaccagcaccctaaagcaaaagacttctggattttgactttggaaaatacaaattcttctacaggagcggtgaaactagtacagctgcctgctctttacctgtagggggagacacatgatgcagtgacaagcatagaacagcacagaagtggttttagtccagaaaataaataaataagtaaattggtctaagtcttcattcctttttgtatttttttaccctgaagattcatggcttcattaaaaacagtaagtgcattctaaatagaatttagtcaattggcacgtagaaaattaaaaagtaaactatccaaataatgctagtctgtcaaaacacaatgagaagaaatttaatcttatatgtttgttgttctaaagcacaagcagtttctaagaattaataagggggaaaaacaataatgatatttaattgggacaattatttttttgttatctgggctaatcacttaatgctttgagcttatcgaatgaaagaaactaagcaactatttcatggtgacaataaggatgctggctacttacttagatctgccttttaaatctgtgtgtgtgtgataaaagcaagtagtatatatagttttttaaaaagaaatatagagagatctaatagatgggagcaagaaccatataaagaaggcaaaagggatctacatgagagaaatatgtaagtcctcaggagatactgaagtaaaacatgtgttgtgtcagtgtatagggaagacaagagacccagccattgccagagaagccctacttcctcatcaaccaccagcaggcagcagcttcatgctgtagttctttttttcctttaatagaataaagattgtggccacactttaataattgccagaaatatgtgttcattaagctttttaagaaatgtgatcgaaaaatgctgatgatacattgtgtttaatagctttaataaaaaactgataaagcatctaatacatctaatgactgtcggatttcctaaatcttttaagctgaaggagtttacttttacaaaaatcctcattgaaaaagaatcttccggtaaaaacattgaactgaaagatttgcataaatgcatggagtattactatttattagttaaacttatgatcttttagagcagtaaaagtcagttctctttcttacaaatgaatttgttttggccttttatgcttttatttaatgagtagagccatacctattaatatataaaaagatcagatctgacaccgtggctttttgaccaggaattgattgaagttagacttgttttaagaatagtgaaaacaagggctatgtcctaattatgaggggaaataatttaattgtgtctctcttgtctgaatatctgatttggatgctttgttataactttaattgaaataattaaatggggctcatgttcatttagcctagcaaaaaggtgatgagctagcatatatgttaaaaacccagctttcctcttagtagttgtctaattttggtcaatgtacttaaattctccaagttttgggggtattctttatcagtaaattctaattcagtgcttaacatagtacttggtactcagaatgtattcaacaaatgttacttatcattattgctataatattattattattattatctgcttggtcaacagtattttccatgcaccttatatatggcatgcatacgctctggaggtaaaatgtgactactggttcaagaaatttacaaagtaagggagaaggaattataaatagttaagtactagctaaatgccatgattgaagcctttatattttttattttaattaattaattaatttttagaaatagggcctcactctgttgcccaggctggagtgaagtggtacgatcttgtctcattgcaacctccgcctcccagtctccagcaatcctcccacctcagcctcctgagtagctgggactacaggcatgcaccaccacgtgtgcataattttttattttattttttgtattttttgtagaggcggcgttttgccgtgttgcccaggctgatctggaactcctaggctcaagcaatctgcccaccttggcctcccaaagtgctgggattataggcatgagccacagagcctggactgaaacctctttaaatatatatatttatataaatatatattatatatatatatacaaaatatataatatataatatattatatattatatattttataaaattatatatatttcttatataaatatatatttcttataaattgtataaatatatatttattatatattatatacatatttattatatatttattatatattatatacatatttattatatatgtattatatattatatacatatattatataaatatatataatattatatatttattatataaatatataatatataaatataattctcatataaataaatataactatttattatataatgtatttctcatatatatgcttattatataataaatatatttctcatataaatatatatgtttattataaaataaatatataaaatatatattaaataattatattatatatttaatatataatatatatgaatatgtattcatatatagagagagagagagccagtggctctacctaggaaatgctccctgataaatttgaagaacataatgctttccatgtggttaggggaggattgaggattacctcacaacaaaagaccagcaagaataaggtatggaagcatggaatgcctgtccatatcaggggactgggaacagtaaaggacaaattgagttaaaggtgtataggagcaactgaacaggatgctccagaggtagattaaggaaataatatttgaggcctacataaataacagtggactttattttatggacagtggaaaatcattgagcatttccaatcgtaggaacaaatacacatttcagaatgacagtaattggaagcagtgtagaaagagattgaaaagaagaaagactaggggcagccccatactcttcagggggctgtcacaggccttgtacaggatcaagataatgcagctctgaactggggtggaagtggggctgtggagatgagggaatgggttcacaactcttcagagataggattgaagggacttgggggttgattagagcagagactgaggatgaacaattttaaagtgaaagtatgagccaggtgtggtggctcacgcctgtaatcccagcagtttgggaggctgaggcgggtggatcacctgaggtcaggagttcaagaccagcctggccaacatggtgaaaccccatctctactaaaaatacaaaaattagccaggcgtggtggcacgtgcttgtaatcccagctactctggaggctgaggcaggagaattgcttgaacccaggaggcagaggttacagtgagccgagatggcaccattgcactctagcctgggcaacaagagagaaacttcatctcaaaaaaaaaaaaaaaaagtgaaagtatatatacacatgttcattacagcactgtgaatgtgcataaagggttaaaaacaatccaaattctaaataatgtgtgaattctatttaggtaggggttaaaaaattcccataataaaatgattttaaataatttatttttgagaaaattttaataatatggaaaaatgtttgtattttaaggaatacataataaagtgccatgtgggcaataggcacacatttaatgcactttaattatgtatattgaattgaacttaagttacttttagttgttgaccagtagttagcaaaggtagataggtttaccattttacattgaatctagtgacaaacatgttatttctcaggtcccagttgttagtttgcctctccttgcctagaaagggcactggtgagacccgccctaacaatatttcaatattatggttccacagtccagcattaactgtattttaaaataataatatctctcacatagggcagcattttatggattattgagcctatgacaaaaatgttgtattatccttcagatgatcagaaaaactacccttagggctgggtgcagtggctcacacctgtaattccagcactttgggaggcaagggaggaagatggcttgaggccaggagtttgaggcaagcctgaaacacagtgagacctccatctctacaaaaaattttaaaaattagctagacatggtggtgcacacctgtaatcccagctattcaggaggatcatttatgcccaggaagttgatgctgcagtgaaccatgatcatgccactgcactctagcctgggctacagagcaaaactctgtctcagagtaagaaaagctaccacatgaataaaagatctcagtgtcaccaaagtccactcctgccagcatcccttccccgctgccctgagtttaaaaagagcaatacttcccaaacctgtctctgatcaaaggaatccccaagggcttcctgagaacaaccacaaaatgactgattcccagactttccagaactgaatgtctaggataaggctcaggatctaaattattaacaaatactcccaggtgaatgggcttgattggccaaatttgggagaataatggaatactgaagaaagcaggtgagagggctgcctgtgtacagtgttgtcattgagttgatgatagcttgttggaaaatacctgtctttctggaaagtatatatagtgacacccacaccctcatctaacaaacagtgcagcccaggataagcacgatcatatgtgcaaagtgctccacgattagtgaaagaagatacaaggtgatattattatctgtgctgacttcgtcatcctgggcatcagcgtcagggtcatcatctgttatctctcaaaatacatacaagattttaagtagagcagcttgctcgtctctgagaagaaaatcaagtatcacatctacctttgtggatgtgggagggagggaatttgggaaatgtttagtaattgcattctttttgtcttcttggacacagtaccaagtctccttaaactaataaaagaaaaaaaaaaaataaaagaaccacacaaactgcattcttcagtcactccctttctccacaaagtgcttcccacccatttcagccttaaaaaatattctaggcatactcagaaatacagtgactgtggtggggcaaaatgttgaaaattcctttgaggctcatttcccaaattttactagttggatgttacactgaattatttaactctaaataaatagggagtgcactcacagcgtcgtttcttttgttatatcaaaaagcctctctcaaaaaatgctttaaaaatcagttggatatattattaatactaatattaataaaagttaacatttactgacatttgaaatgtaccaaacactctagatgagtaatctttttaaaccttatgatatccaaagaggtagacaccgttgctattcctgcttcatagatgcaaaactgggctagacaagttgaataatttgattaagatacataggtagaaaattacaaagtacggattgactcagagggagaatgtcaagtcctctcctaaaatgtactggcatgtacacacatacacaagctgctggatgtgctggtcctcaaaagttattccctagggacatctctcttcttttttttctctctccttccctccctctctctctctctttctttttcttttttcttttgagaacagaaaacaaatctataccatctattcctgaatgtatatgagtggagggtaggacaagaggagggatmagatctgtggatgcacagaaactctttgggaaaccctaaaaactctctatagttatataagctaaggaaaggattcctgccagggggtataggattcttcaattcccacacttctcttcctgactcttctgaagtgcccgttgtcaccagagtgcccaggggcagagcattgacaaggaaaggcccaggtgtgtgtgagaagtcaggcagatggggtgtttcggaggaaccagggtaacgcagtgcttcagcgttagcactcaccttgcttctgggaccacttaccacgaaggcctgaaagggcaggccccaactactgggaatattaatcttctctttgggtgaagtctcttcatgccattatcatctcttagctaccattgctaggcaaaagtttcctagctcaccatgtcctgaatgcacttccttgagatatttctgatgcttaaatatccagtgctttctagtgtgccgtcttccttctgtatttttgttttgttttgttttgtttttttgtggttccttttcagcactgttggtcctgtggaagtatttctaattgactgtattctatatgccacacaaaacagatgggtgtttatgacattcttttctggatatgtttctgatgtttgcatattgaacacagaactgtccacatagagaacttgatttctgcctcttcctggctttgcttttactcatttagtccctagtatgtgaaaggctatgcttaggctccaaggacccaaggatgaataaaatacctccagtaagcttcaggaccattactctagaggtttgtggaacttaaaaagctaaaatgtgttctgttgaatgacaaaaagcattaagttaatagaaaacagagggcttataagtgaatggataaatgaataagtaaaataaagaagagagaaaggaagggagagaggaagaatggagcagatgcaggtgagattgtttttctaaagagctaagaagctgcctacagtgttagcttagagactgaaaatggtttgggaaaataattcagaaatttagggaatacttcacagcatgagaaagtggagggctgagattggtaaaagaagacatgtttcaaaatagccaaaaggaaaatagaaaagaactggtcgtgaaaccgagacctcagagttgaatgacaagtaagatacctctgaagtcactgacagtggactgactgttatttgactaatattgcttctacagagacagacctaggttttatcctcccatagaaaaaaatctcaaacattggtaggttttgtttttgtgttttgacatacaagtcaaaatctatgtgaaggaggaggaacaagactcaggggtcagaaaattggggtttcgtggctggctgtcctgctcacccactttacgtgtgaccttagaaaagtcacgccgatgtgttagatcttttctgttaaaatgtggtgggtaataattataccttcctaattttgaggaattacatgagataatctgtgtaaaaaaattagcacggtgtctgggacatagtaaatgtcaggtcttatttaaaagcatgtggaaagtgcttaatatgttgaaaagtattataaactaccaataaatattattatattattcaattactgttgatcctcaaaacagccatctctggaaactgtgcaattatttgagccctgatgccattgctgaaagcattttggaagtggctttagagaccatttacagaccatataagacacacacataccaaaaagcaataagcaatctcactggtttatagtaacacttcacttatgaccaaaaatattatttccaatatgattaccaaccctattcaccagacagaatgtcaaattagcttagatggggctaactccagaaatgaaaccattctcaagggattttaaagagttttttaagaagtatcacatggacttttaaggcaattccaagacagggagccctaaaatcattacaatgatggcaatgtgtggaataagcatataaacacattttcccagatgcaactttgaaggagacaaaatctgaattctaggcagtttgtgaaggaaaaggagcaatttctgggaaatttcttttacccctcagccaacctcaagacagtctgtctttctacagaccctcccttgctgtttctctttactggaaactgttgagggtactggaaataaaggagaaggccaatgtatctaagaccagtggatcagagaggagcccaagaaccttcatcatttccacagaaagggcagcagaggaaattaacctggccttttgtcatgctattatttctcagtgagtctattaaattattgtggcacactaaacagtgttgtctgcatcttgttctttggggattccatacaattctccccttggctggcttatcacctccccttagaaaatggtgtctcagcaatgatcctttgcttgcaatacaaaaaaaccaactctgctcattaatgcaaaattcttagtggaagaatataggaagaattctgaattccctgagaattagtggggcgacaggtggtggtgggggtgctggaggacgaggtttgaaggaatcagtgcatctttacagtgctagaaggctacaaatcaaggggaaagtctcatggcaggagtagtcgagtgagatccccacaactgttcttagtttctttgtcattatttcaagagtcaaacagcagtgaagggatctaatttgtcttgtttgcgtcctgggccttggctaaaagagaacaggcaggtggcttcagttctaccaaactatgttataaaatgtggtagtaagagctgaatgatgggaccagattttgtgggttcatattctagcactacgacttacagatgcttgtgctcaaacaattcatttaaccttccagagcctgaaattcctcacttttgaagtaagcacaataataatatttatctcatagggagttcatgaaaattatttgaggagatatttatgaaaggctgggcatggtttgctcacgcctgtaattccagcatttkgggaggctgaggcgggcagatcacctgaggtcaggagtttgagaccagcctggccaacatggtgaaaccctgtctctactaaaaacacaaaaaaattagccagacatggtgttgcacacctgtaatcccagctccttgggaggctgaggtaggagaatcacttgaacctgggaggcagaggttgcagtaagctgagatcgtgccactgcactccagcctggataacagaggaagactctgtcttaggaaaaaaaaagatatttatgaaaaatgaagcaaaatgcatggctcacagtaagcacttgatcattgctggttaactattattaagattatctaatagggatacaaagtatattcctgaaagaaattagggtgctcttagataggggaaataaatgctagtaggattggtttcaatgcactatttattttattaatttatttctcactgaatttctttttatgatactcattttttttagagatccagatggtacctgtcattaatgtatccctgagaactcagttcctctgaaggcacaaaaataatttgaccatctcatcatttgatccacacacatttattgatgcctcttttatgcttggttctatacaagacgccgtgacgtgtggcccctgtaggaagtcctggcctctgtctctaaatctgtcatctcagcccaacccctattcagattatctgtgccctctgcgtagccattcacttcgcctgggtgcaatcatgccttccttacccaacgtttaacaagtccagcctagcaacctacatcatgccatccaacagaaggaaggcattattgactcagaacaaagtataggcgctcttagaataagtttattaaatcatttttttaaaaaaaagatatgtgctttttcccaggggagcagtgaggcattgtcagagggtggattcattaaatcaatacagagaatcctggctgcactatttgttagctatttgactttgggaaagttattctctgagccttgatttctcattagaagacgggaataatagcaaacctatctcagagcattaagtaagaattaaatgaagtgaattaagcacgaaacctagcatctgacgcatagtaggaactaaaaaagaaatactagttcttgaataaacatttttttcttgactgtactgtgatacttccatcagtgagtttccaaggcaaatgaatcatctttagaattggaagctcaatgtaagcaacaatgaagtaaagaaaacaactgaatttctcttgaaattattttcctttactgacttgtctttattgtctgtgttcacaagaaactagctctgactgcaaaaatgtctgcctgtttctatggccagttcttttctacatgtttaaattcctaattgtgcacacaatcttagtcacaatattttcatgtgcaagcaattaagactcatttaacagccctccctctggaaggttttgttctccatctgccacaaatcagattccttaggaagatatttgattttgaaacaatgttaaagtactgttcattttgttcaaatttcatttatgtaccattttttaaagtgatgtaaatggacagccacaaaaagctcagcagctggtcaaaacaaaacatcaaagtcaccattgaaatggggcaaaaaaattaaaaactaatatgctgggacaatgccaaataaaaacgatagtctgataaacattcctcagacacattttgctcataacaactatttcctttacagcagatttaaaatatgggaaaataggaatataccccagttgccactctgaatcttagctgtcctgagttcactgcaatgtatataataaggaagtcagaaggtggaaaagaggaaaagattaaatttgtaagttttttgaaagatatatggtaaaaagtagaggtatccaacagatttgtacgatagattgttcatttaaggaccaggagcggtggctcacgcctgttatccagcattttgggaggccaaggaggggcggatcacctgaggtcaggagttcgagaccagcctggccaacatggagaaaccccgtctctattaaaaatacaaaattagccaggcgtggtggcacatgcctgtaatcccggctactcgggagactgaggcaggagaatcgcttgaacctgggaggcagaggttgtggtgagctgagatcgcgccattgcacttcagcctaggcaaaaagtgaaactgtctcaaaaaaaaaaaaaaaaagattgttcatttaaaaatcaattcgattggccaggcacggtggctcacacctgtaatcccacagcactttgggtggccgaggcaggcggatcgattgaggccaggagttcaagatcagcctgggcaacatggtgaaacccccgtctctactgaaaaaaaaaaaaaaaagtagccaggcatggaggcatggtggcacatgcctgtaatcccagctacttgggaagctgaggcacgaaaatggcttgaacccgggaggcagaggtgagatcatgccactgtactccaacctgggtgacagagcaagactctgcctcgaagaaaaaaaaaaaatcaattagataagtgagagtgtatattcagggcaacttaaatctatgctctcagattaaaaataagatttaattacaattttttttttttttgatgcagggtctcactttttgctcaggctagattgcggtggcacaatcacagctcactgcagcctcgacctcctgggctcaagcaatcctcccacctcatcctcctgtctacctgggactacaggcacatagcactgcaccaccatacctggctaatttttaatttttttttttttttttagagacaggatctcacgatgttgcccaggctagtcttgcactcctgggctcaagtgattctcctgccttggcctcccaaagtgctgggattacaggtgtgggccatcacacccagccaattttgaagtatttaatttttaaaatgaaaaattgattagataatagttctccctcactacaggtgaagtctgtttttatttatttgttcaatgggcttctttagaacatgacatagaaggcaatccttggtcaaattaaggcagaaacaagaatttattaggttctgaacataaataactgtctgtgaactggtaactctctaattaagcataaatgtgaaaagaagaggattagctcttcttgaggagttggaaatggaaaatattacaatttggagaggtagcttgcagaaaccgtacagttttctctgcttatatgccccagcgttgggagacttgaaaggaatcaccaaccaagttaatgcaataaatttccatatatagatcaattggatgttttgtccccagcttcctaggcctttaataaactgaattgttttggtatcactggatgaaaggttctgtaaaagttcaaagtattgttatttggggcattcacacctgcatgtttaaaatgcctttgtgcagaatgtagtccaatctgctttcaaatcagaccttcaaagaagggtagattcatccatgtgacagatccccttaggtgcttctctaaaagaaaaagttaagctagcaggtctacccccactcattatctttgtctctttgtgcgtaatcatcaaaccgcacctctgaaaagaagaccaagagaaaactttagtatctctttgctggagatgcaaagcaagatatagaaggaactggaaaatagttcttaagtaaatacagggggaaaacggaaattgagaggacgtacttttcgctaacagttgtaaactaaaaataaaatttgaagcacgcctgcaccctcacctgaatggacttcctccttggccagggcactttaaaatttaacctgaaagactgatttaggccgcaaaggaagtcagacatgccttattttacccctccagtattaacatcaccacagaccttaagtctgataagaaacatttaggatctcttttcttggaagcctgctacctggaggcttcatctgcctaataaacctttggtctccacaacttttatcttaacccagacattcctttctactgataataactctttcaaccaattgctaatcagaatatgttgaaatctacctgtgacctcgaagccctcccccaactttgagttttcccgctttccagctttccagatagaaccagtgtaaatcttacatgtattgattgatgtattatttcttcctaaaatgtacaaaaacaagctgtagcctgaccaccttgggcacatgtcttcaggaccacctgaggcagtgtcacacgtgcatccttaactttggcaaaatacactttctaaactgattgagacctgtctcagatattttgggctaacacaatgaatatgaaaaaacttttttgttggcgggggtgggaggtgggacggagtctctctctgttgcccaggctggagtgcaatggcgcaattcggctcactgcaacctccacctcctggattcaagtgattctcctgcctcagcctcctgagtagctgggattacaggcacacgtcaccatgcctggctaatttttgcatttttagtagagacagggtttcaccatgttggtcaggctggtcttgaactcctgacctcatgatccacccatctcggcctcccaaagtgctgggattacagggcgtgagccaccacacccggccaaaaacaactatttttaaagagcatctaagctcagaaatcacaggcatattacgcctgccactaagggagttagttccattgaaggatataattaagagtgaaatgaatggtgtgctaagcacttagggatagtggttcacaaatttgtctgttccttaaaatcaccttggggggcaggcgtggtgcctcacacctgtaatcccagcactttagcaggtcaaggccagaggatcacttgaggccaagagttccagactagcctgggcagcgcagtgagatcctgtttctacagaagataataataatcacctggaaatttcttttttttaatgcagctaatgaaggaaaaaaaaatccgaggttttgaaaccaactcaaagacaacagcgatattcaagcataagatgtaataaaggttgtacactagatagctagatagccagaataaaaaggaagagatagttacaaaaaatataaggaggataaatgtataggatttcataactgctaatcatatgattttactgagtaggtgtaaaatgcttctgataatgtgtgaaaatttataatccttcgtattatatgtaggataaacataggttaagacctggattctaaggctgaatttaaggctagtttatctccatccttagatttcctacatttcatttaagagaaaatgtcctgtatattgaatattcatgaaaatctctgaaaggtgttatgcttattcttaacctcttaaaggtgtacactgaatgtaattaaatcatttttgctggctctggttcctcatgaacatctgcttttgtacttccctgtcattcacaaatgcacttaggagctaatgatctatgaggacttttttttcccctacagtaacgagcagcaaatctggctgcactttaatttctcatctgctgtcccatattgtctggtggtcagttcatgatgttactaagcttggctttattggcatcttttgtgagctgctgctgctttttccttggcaaacctgattaccaagctattgcattgagcataaaataaaggtaaattaattcaaaataaaagtgaaggttgagggcaattcatttctgaggtagacctttaggatatgagatgcataaagtgaacaagatcctacaagtgtttacttgacttttctgggttcttttcacctacttactgattttgaatagtataaattcctggataattaatctggataagtaagtcgtcactgtacctctagagaaaataaaatcaaccaaaatatgtttaattctgtgctctgggtttcaagaaaacaaaaatgaataagatatagtcctacccccaaggacttgacacaatataattgtacatgtgcaaaagaaactgtctaggtgtggtggctcacacctctaatcgcagcactttgggaggctgaggcaggaggatcacttgagcctaggaatttcagaccagcctgggcaacatgatgaaaccttttctctacaaaaaaaaaatacaaaaattagccaggcatggtggcacatgcctgtagtcctagctactgggggagttgagataggagggttgcttgagcccaagaggtctaggctgcaatgagctatgatcacagcactccagcctgggcaaaaaatcttaagtagtctcaggactgtaccacagagtatcgtaagaattcagaggaggcaaagaccaaattagaataataagcacatgaaggcttccagcagaacatggtatttttgttgggccttgaacactctttagatgctttagtttaatgtgccatagtcacactttctgtattgggagtgttaatgggtgataactactccagagctttaggattgcttccagtatcccagcaaagcagcccttttcaactagaaccgtttgctattacaaaagagaggtgatcacttgtgatttcttaacatttcttcactttgcctctggcactgggcttctgaaagtccaggaaagagcaatgacctcagggttttaagaccaggggtataatcccagctctgcctagctctctgtgtaatttttggtcagtaatttaacctgggttgtgttctgtaaaatgatgatattggattaaatagtacctaatcatctaactttttcctaatattttattattataaaaaaatgcatgcctctgatgaattgcctttatcttctttagtcatatttccctaagaagtgaataaaagataccaaggcaatgtgtgaattccactttttccaatctggatgtttaggggatatccttgacaccatttgctattttgagttttcaacaaagagttaaaagaaaattctggcactcctatctagtcatcctctccagttggcagaagtcttcatgtggacttgatggttgcccagagcaacaaaatattagggacagaaacatgttcagggactcgattgtataagtgactcagagctgagagaccttttccagcttgactgcagcccatacttagctaaagtgggtatttgtctattcctgtctgcatactgtgacttggagatgcctattattttgcttgctaaaatatggaagccaaccttgaaactggcagagaagagttaaatgatcagaaggcaatcgtcttcattcagcacgtctgacacatgaaagatcattaggactagcaaatataaacaagatcagggagtggtcttgggctttgaagagcacataccaagaacatcaagagaactcaatataaattcaatataaaagctactattcaaggccaattatctcttttgagttagaagagcccaatggagagccactcacgcaaatcaataccctttccttctctcagttggagccagacatctctaactatcctctgaattaaactggatttttaaaatgtttttctgtccctaaactctttaaatcctgaggtcatcctttctttgttccatcagtctggctccatgataccaattactccagcttgttaaagcagttattggcatatggtagtcatgtcttttgtttctatgcaatgtttcctggagcaagaattggagggagaagtattagccaagtcttgttgctttaagtctcctctcttcaactgtttaactaggttccatcctaattatgtgtttggttggttttattttgatacccaatatacattcttctcatttgtacatraacaatgtcattatggtaataataacaattatacaatattactttctgtcctcattgaatgtcattatgatcaggagctggtcctcttggtttggacattatwatttgaaatgaatattctttttaaatgattggaaacttagtcgtaaattcaagtggtttacaatagtaactcttatcccagtaaccacagcacctgtttagaaaaatgtcttcggatcacttgtttgcaaatgtctttttccttaggatcctggatggaattgaacccatatacgttacttgacatgtgaaacacgtgtgaccctggcagatgatttggctgaccttgaaaactacagctgtttagtcactttgaaaacaatgcaatacaagtgatttactaggcttcagttttaaccattttatgctgactggtggaaattctaacccttcagaaagaaaaaaaaattgtgaagcaatggaaatgtaccatcctgggtattaatgtcattaattttcaatacattttctcacaaaaagtataaagaagtctttgcttgaccttacgggaaaaaacaacatacatgtggctttattttgcctttttttttttttaattaatgaagaaatccaagatttgacttttgtttcttctctacccaaatcaaaagcagtctataatctcctgcaaagatcaaagctttttgcttactataaagtatgtgccctgcttaggcattacatggtagaaagatagcattctgttccaagaaatctctattcgttctctagttgctgtgtatatattctcttttagctagaatatggttagtaaatgagtcctgaaaatttcgctgtatataccaaaacatgttgtataccataaatatataaaatatttttatttcaattttttaaaattgtgcttcaatcaagacagaagttgatttctttttccagaaattcagagtgagcagtccagggctgctgtggctgctctaaaatcaccaagggcccagagcttctttcagataatttttttttaacatttactagattcatagggcttttgtcttcatggtctgagatgactacaagagccctagccatcacaactaagtggccagcagcaagaaggaggaaaaaagaaggaatagtacacccactccttttagaaaaggcttctgagaaatcccacataatgcttctacttacatctccttggctcaaatttagtgtctgccacaaaagagaataagacacacacacacacacacacacacacacacacacacacacacacatatatatatatttttwttttttctggcaagtctctagttcagggatttcaatctcctttaagcaaatgagtcttctcgctaacctctccctctggcctgcccagtctctctcgaatctcattgccatcctgtcctccttactcactttgggaaaatccagctctgtcagttttacagtctgccttttccacttccttacctgaattcctgggaaaaataatcccacatcacttcaagctggaattccaacaaagtcaagacctgtcacctcatcggactctcagagcacttgacagttagttcctgctgtgcccctctctcagtcctcttcatgctaattccaaacctgtcctctctcttaagcctcccaaaccagcagctcttcatctcctttcagcaaataacttgttgctttttgaagaaagtctgtgtcaaggcatgaacttcctcagctcctacatcctcttgccatagatgttatccataggtctcttactgacatccataatcccttcctcccttctggtctcagcggatgacgtttcccttctccctcctgctctaagtcaacccctgcatctgggcccttgatcctctctcctcccagctcccacaagtccttgcttcgtctgttttcctttctatctctcacatcttcaatctttacttttattctggctctttccccattcatgtctctcacaatcttaaaaacaatacacagcaaaccacagcaaagttcagccaactctttattgatcctttagctagttcttgatcttctcttttcagtcaagttgctctacctcctcatccctattcagtctgcagtccactgtagtacgactttctcacaacacctctgttccagctgccctcccttggttgccaatgaactcctaattgtcttcttagttcttagaggcttcttcttcttaaactctttctttgttcatttactgagtaaatatttattcaacatgtttttgttgggagccattttgttccagatgtttccacactcttcttgctgctctgaatacttcttttcactattcttcatggtctctcttcctccccactttacctcttaaatgtgagtattctagaatgttctttttgattaattggttttctcactctgtgtactctgtagatgttttcatgtacctcatagttgtattttccatcttatgaaagtgggtcccaaaactctgtctctactcagagtaggcacttccccaatttccaaatttattcacacaaaagcccaatgtccattgatatccaactcttcaaatccaatatgtccagagctggactcacatatttctttgcaaatctgttcttcctatctcagttagtgaaacacttttagccaagatcgaaacttataaatcatgaatccttctaccaaatctatctgtctgtctatatatatttttgaaacagagttgtctcactctgttgcccaggatggagtgcagtggcaagatttaagctcactgtaacctccacctcctgggttcaagcaattcttgtgcctcagcctcccaagtagctggtattacaggtgtacaccatcacacccagctaatttttgtatttttagtagagacagcgtttcactatgttggccaggctggtctcgaattcttggcctcaagtgatcctcctgccttggcctccaaagtgctgaggttacaggtgtgagccaccatgctcggccccaaatgaatacaatttttattttattttataactattgatcaaatccatgctctcttctctaacctgctaatatttccctagttcaagcactcaccaactctcccctgaattatagtactagtacctgaaatagtgtttttgaaactgtcagttgcatttagcattttattttaaaaatatgatacagaattgcgtaaaaaataagagtataaaaccacatctataatatcaaagataaatatggttttataaaattattgatacacccacagacatgcaaacacacacagacattttgccatgaaaatgtatttcttactataatttttaaaattagagaactactttcttaaatggtcgatctctgttgcacctcttcttagctctggccttccatgatgccagcaaatttatgtagttgaaaaattaatctgcaaatgtcactcttcttaaaaccttttcaagccttcccatcatccatgataaaatcagatctctttcgtgtggtacccaaagcccctatccagatatgtattgtacctcctctccagcccagcccctggctgactctttcagcagcaaactttttccacccacgtgcaccatgtttcacaactgtcttcatttacttgtactcttctcaccatctaaaactcgcttctctctcataattgcctggttcactttatctcattttagaggacacctaaaattcaagcccagtccccttcctcaggccgagtcaggctcttctcccaaacctacctctagcataacctaatgaaattgctctaaaaattatggtctatgcctctttattaaaaaaaaacaacaacaacaaaaaaaaaaaccctgcccaccagtatagcaattcttttgttataaccacacatagtactagtgtgtggttctggggcactgtcatgccaacttacctgtgttcaatagacctgaagtagggaagatcagctgactcttttacatctcttctcagaacatcttgaaatgattcttgggtgcaatataagagcaaaacatggaacagtagaaaccagcatggaaaactttttctcctatttgagaaagtgggatgaaaatgtgtctcttaatccctttggcagaagggagtaacttgaaagaagtggatgatggatgatcttctccactctgtcagccctctgagcagaatgaggaaaatgtgagaagcgataccattgctatatttgtttcattgaccattattttaaataacttacatggtcctgaacaaggacatgtttttgtgaaaaggacaacatttcttttggtgtgtccgagtagcatttaagaaaagccttatagtggtcaatgaaggttggcctttcacccgctgctactggagagtctgtgagaacactatttattcagcctcatggaaacactagggagtcatgcctgggatctgacaactgtgcagcaccatgccaggtgcacagagagttgttgtgatgaatgtcgagagaggtggtgggggatttttgttgtttttgctccttccattttctttccctctgacttgggctgtggtttcattcattctacctccccacccctatgcaagaatagatctctgatctctttctcatactttatctgccctaacttccactttccttttcttgagaggagaagaacaactccacagtgctttccttttatgttttgggctaattttgttgtgttgttttatggtcttgaactgagagctgcctcagcactcaacaccagcccctggactgtgagactaatgagaaaagcaaaatgacttcaagtaaaaggaagtggtttgtgttgtggagagaaacttggaaagaaacaccaccaagaacactaggggctttattttccctaaagcctacagttgggttaacacatttcaaaataaccggtcaatttagttaatcccatcaaacgacctagtcaatacagtaaagaggtagggcaaataaacaaaccgttttttggatgaccggtttagcttcatgtatccttcgtcttactcatttctagggaataatttcaactcaaggaaatgtgaacatctgttttgcaaactattacaggctggtttaatacaaaaatacctttaaaaaaggtatgttcatactcaacatgtttttccagctgttattaaagcaggtagaaacaatatagtaggcatagaaatcttgattataatgtggaaaaactaaggttaaaattattagcagaaatacatttcttttccatccttccactgtctgaacatctctctttcctacttcctccattttattattttctttgctttgtttctctcttttaacctcaataataacaattctgtgtgccaaacactgtgctaagactgggcatgcatgatcacataaggtaggtaaaattattattcccattttacagaagaagaaactgaggctcagagaatttagggatatgtcccatggtcattattctggaaagctgtggagccaggcttcaaaacttggcagttatatttcagattccacaccctgcagtcaacactctgctgcctccctcaaattttatctcagttcatttgttttctccgatcttctccttttcacatgttctctactctattctcttgcctttttcctttccttatatctgcctcttctttttccagtctcttccctcactccttcccttatttgtcttgtttcccattctttgtctaaatctcctcttttctctccctcttcaccctattcattcccagctccctaaaattatatcattcttccttcatcatgctccctcattcctcactgcagcatcacccagtccaactctgtcccatctgtgattcctcacttctgctttcgcaccatctctctccctaaggtagaagtggtgcccagctttaaacacaaggcaaagtgagggtatgttccactaggacagcgtgtgtcactctgctgccatacacagggagtaccatcagtgattataaagaggaatttcattcctgccagagagctcacaaattaggttattgttgatgttcatatagtttttagtgactggaaaaagataatgcctccttctatggtcactaccaggaagtgagctccatgcagcagacagaaaccaaccagataactgtgagatcccagccaagcacaatttctacatgttagtcaattgcaagaaacactgagatgtaatgtagtactttggactcatattactcaggtgactatgttttcaagcagccagtacaggacagaagagattcatttccttgaatcaaagctatttggtgacttttcctggaaacactctgaggcttacaggaagggattccagattcccaagctactggcacagagtaagcatcttttctttacatagtaattcacaaacgtccctcatcaccatatgacaatatcctcactggatcagctcggttaccagaaataactagatcaaaataaatgtcattctcacatggacacaggtggactagggtttagaagttttgggaaccatcacagttctaggcacctgaaacttcttcttttgcttgtagtaaatatggtgtctttctcaggactctgccctttgtttatttatatatctggtctggtttttgttttctagagatagttctctactctccatagtgtctgctttctcattgcctgagtttgtacatggcttgccatagcttctctaggcccaattttaggccatcagtagatttaaaaatttttttttctcttgacaccaattaccttagttgcaatttcccatttataattgcaacttgagcctacaaatttacaaatacaatgaggtaactttccactgtggttaaatattatagattattggctgctggtaaacccatgaattgcctgcctttggattagatattcagaccaggtccatttaacaattcagacatttttttaaacaatacttttttgagagtcttccatgtgccaggccctaatcaaagctcttgagatacattgatgaccaaaaagaagcattatccccattcttactccttataatctagggtccagcgacasggcgagatatgcactgtattaatgaaataatctgtactgaatgtaaaattccaaactgaagcattttatatgaaggaaacattctmtaaaggaaaagtgcggaaggcccccagaacgttccagtctacacatgctcctggaattttatgggaaaataaaaagtctgtcagaatggatcttttgagaagattccagaagtatgttggccaataagagaaaatgagcaagtggatgccagaagccatttcttccattgttgtgctcagtttgcagtgatactactgcagagcttgaaaggcaagtactggcttctcttcctcttgttcttccacccagaaaaaccatccttatcctcatattcctcctccaccttcaccaccactactacctattttgaggctgccaccaccacactataacatattcctccccgctctaaggctctgaatttggacctcccacatgacaggactctaaataatgactaatccattaagtttctgctccatttccaaaatattcattcaaatttgaaatgcctggggcctcttgtgtagccatggctgggctaatttctgcatttgcattttaaacaccctgaatcaggattacacctgaagactttcaaataagtgcttagatggcacaataaagatattcaggttaaaaaaaaatctaatgagtctgttgttcctttgcaaggcctagtgataggaacctcttcttggaaatatttgttaagccattctcacttgtagtcactcttggtaccaaatctgttgaccgaaaaaaaaaaaaaaaaaaaaaaaactcgaggagagagggagaaaggcaaagttactctaatgttttaactaacccatataaccacggagaaccagccctaggaaccaacactaaaatcttaaggactgttttttcagactctgaaaattctcctaaatctccattccagtatcattcaagctctttacaaccgctgtttgtccttaggctgtaacttgtgcctgaaatcccactctaaggttcccttgtggtatttttaatagtgtttgatgctgcagccagcttctctgcggtttgggagttaaatgggatacagcaatgtggtgtgctgtaatggctcttggagaaatgttagggcaaattaaattccaaataggatagcacctgaaagaacctggtcctttagtgaaagagcgtaggaaggaaggcttagagagtcttactggctcctaagtgattaagaagaaacatctaacctgagtttgaaattcattttggactcaaatacagagtatttactttaagacactggtccttaaccacctggttcttccctgtttgcttttctgcttagttaagcccaaagatgggtgttagtttaagagaaaatggtactaaaagggaggaggggaataattaacacctttgcttaaagcaccaaatcccatgagctgatgattgcctaggttaggcaatgactactaccactactaccaaacaggtctggcatctcctattcctatcctgacacccaggcccaagctgagcacaagcattgcaggattccgcagcctaatgtccgtcagcttttcctttgaacagtggttacatatcgttagtgtatttgagtcaaatgtgggtttaaggtagtggaaagacttttttctgctattgagaacagaatcaattttttaaaatgtgtatgtacacacacagatacacacacacacacacacacacacacacacacacacaccgctatatattttattttggaaaacagttttatttccastagatctttattgaataacctatcatctacggagttcctatttaaaagttttcattggtaatggatttattccagacaggacaggttatatgtaaaatacaattcgtaaccaattaaaacaataacaaataacttgtgctgagtggttaccatgcaggtgctgggatacgctttctctctacatcatcatttcaccctctccacactgtttgaggtgtggatctattgtcattgtctccatgctataaatgagatgaggcacagatgttttttattatctccatgaaacaaatgagagcactgaagcttagagaaggagagaaacaacaacttgaaggtttagatactgtttgaggagttatagtaaaaagaaaaatgaaaagtcctctcaagttccactgaaaatcttataagtgtgtttctttcccacttttgcaatataatttttctcttctaccctcaactgaaataaggtcacacagcctatacagtatagaaccaggactccaaggtcactgacaacaaagtaaaagtcagcagttttggaaaatacatattttttttttcctagctgaggatgggttaccttcattagtgacataactatgtcacttgaatatcaattattggcttgaatatcaattcatttctctattaagaaaaagaggaaataactcagatataaatgatggaagtggctactgagttaggaaaacatttgaaaatcactttataccaagaaatcacattctggcaggcctaatatggtataggagatattcgtaactggttatcttcattgaaagattatagagactagagaataggaaggttaagtaaaaactctacaaatgataaaattttatgttaacaagtaacctaaccaaatactgtatttcgctggactttattgtagacaaacagaaattctggcaaaagaaaaacaacaaaaaataggaaatacagttactaagttaaagctcttgcatttacattataagtatttctaaatccagtttaagattgtggaaacaacaacagaagtatatgaaattctaaatgccatttaattaaagtgttgaaagagtagagatttcaacagtatcaaaacttgtgatcttcaaggatcaaagtaaaggtgagtttatagaatgctcactctaggttctgatttggccaagttcaatcacaccactgcccaattcaatgaaaaatataggcaactttgtcaagcaatgaattttatcaatgtattcaaagttgaatgcatcttaggaataatttgagggtttagaaaatgtttgaggttttttttaaaaaaaatcttccaatttaactgaaaactcttgtatttcctttctacttttcaaatatagcctttgtcctttaccctccattgtagcttaagatgtggtcttgcattataaggaatatttaaaaccattcaatattttaaaccaaagacattcaatttttaaaatttaaatggaactgccatgtattcttgagtgttgtagctatacagcagtggtccccaacctttttggcaccagggactggcttcatggaagacaatttttccatggatggtggggagaggggttggttttgggatgaaaccacctcagatcatcaggcattagattctcataaggagtgcacaacctagatgcctcgcatgcacagttcacaataggattcacagtcccactgatctgacaggagataaagctcaggtggtaatgctcgcttgcctgctgctcacttcctgctgtgccaccaggttcctaacaggccatggaccggaagcagtctgtggcttggaggttggggatccctgctatatgggccagaaatgtgaaagaggtgttcagtggggagtatacttctaacttgaatacattcttttcagcatttctacttattttatcaaaaggtaattttttttctcaggaaataaagcaataggcaattgttttttatagtttttctgtacagagccttattcaattatactaccaatgtaatcctattgcactgctcaacagaatcagaataagaagaacttccaagtacaatttgaaaataaaagtatctttcaagaatttgcactgtactgcattatttgatttggaaaaaaaaaaaaatcagaccacttccatttcttgatgaaacaactaactcatttgctaactttcaactggctctcttcagtggctttgagaatgtggcacttccatcataccttgcctgtagtaccaccctagaactttttttaattgaaaatattttaaaagataattgattcgtatgcttcaaaattcaaaacgtgccctagaaaggatcgattattaacagcttcttgtgtattatgtaaacaaatcttatgcatatacaagcaaaatacatattggctagcactcttaaaaacataggaagggttgaatctgaccaagttaatatttcaaaggtgtctatcagaaaggaaaaggaaagcttcctacagttatgtgtatatttttttttagtttaaaaagaataagaacaagatattgggtgtgtatgtatatatgtatctatttatttattggagacggaatcttgctctgtcacccaggctggagtgcagtggcaggatctcagctcactgcaacctccacctcccaggttcaagcgattctcctgccttagcctcccgagtagctgggactacaggcgtatgtcatcacgcccagctaatttttgtatttttagtagggacagggtttcaccatgttggccaggctggtttcaaactcctgaactcgggtgatccacccacctcagcctcacaaagtgctgggattacaggcatgagccactgcgcccagccagattttgggtttttaaacctattgaacttatctttggatacatattttaagttttccttaactgtaaatgtgtttatgttcactagaaacaccacatgatttcgcagacatggaattatgtaggtgaaatcagcggctttcaattagggctcgataatattagatatagtataacttttatggcattcacacatactcttcagggataccctttgcaattccggaatagtgtttttcttgcttacttcagtcgatttcttatatctttaggaaagatctgcacattcattctaggtgaatgtaaaattgcattttaaatccattcattgggaatctcacttcttaaaaatcatgcggaaagatagatgtacatttttagtaaccgagctgttcagtaaatttcttaagattattttctcataacctctgtacatcaaaagtgaaaagaacctgtccccttctctctgtatgcaaaattccagagaagcaccaagaaccagaagaagatgaaagattcggaagagcacacattttccagcctgccagcctgggtttaatttcactttcccaaatatttacttggtaaattcagaaaaatcactggacctccaggaacctcatttccattactgtcatgtgggatagtgataacactatggatcattacaaatattaaattagactgtatggagaatgctccaaaagctaaattattgagtgctcacaaaaagcattcaacaaatacacctttccagttgaaaatgatcattccattaaattcaccctttattttctttgagaaaaaaaatctatgcttctgcattttcaaacttacttttcatggatacatagtctgtaataaaaacagcatattaaacatacctttaaaagaacaaagacatttataaaacaataacaacaatcagcttctggatggttcccccccccccccccattaaaccctattaaagggaatacggtctctaaaagggaaatccagagacctgtgtattcgagttataaccctgggtcaagcaacttaactaggctgatattttggcttgatgtgatttatatgtaaccttttaagcaatgtatattaaatccgtactttttactcatctacttgattgcaagctcctgcaagataaactttgttgaactcaaatgttgtaaacttcatggggcttagatataaactacagacttcatcagtgtttaacaaatacttgcttaagaaacacaaagtcctgttatatcagccaattaactatgaagctaattttaataactgaaatatcatagaggttaatattcaaaacaccactcatcttttttctcattgagtattatttatttatttttgctttctggagacatacgtttaccctttatttactgtctcattttgtcatctctgaacataccatttacagctttttagttattctggaaaaatcactttgtatgaaataataggctatgatggctagaaaggatctcactgatcatcagtgcaaggattgattttagaaacaaggaaagtgaaaccagagacagccagtgactagtctcagtactcagagaggtcatggttggtcagaggtcagaactcacatctcctgacccacagcacgtttggctttgtgcacaactgactgccttagttaaggacagataattcttttctctttaacaatagaaaattagactaattaaagtcataaaagatgttgctcctttataagccatagagaaacccccgatggtttctttatttggatctgtgatctttaaagcatgtgactagcagctataattggattaaagtgaaaacatgtgattgtgaaggagttaaagtacctttgccttattctgctttgatagccagcttcaattgcacatcgtgacaagcagtgaaccaacatcaaccctgtggaattaaaactttagactctatcacaagcttttccaagttcaaagcccaccaatttattattggttccaagttctaggtctagaatcaagtcagctgggacatcaaatacttgttacaaaatgacatttgaatgagataattataaatagcactagaagcacatgaattaaatattgcctgaacactaattttcttaggtaggatattgggatgtcctttgctttatcactttgcagtgatgtgagcagtatgagatactatgttttgcaaaactgtattaattataatatttattgagtacttactatgtcccatgcacagtccaagtttttcatgtacatattattatttaaccttcactgctatgcttgcagatggatgtgtggtatattttagttaactcgctcaaggacatgcacagtaagcggtgcagctgaagtccagactgggtcaggctgactccacaacctcttaatccctatattaaattgatatatctgcccatgctatacatctacttgatctttaggttgatttattgatagtgacatttaatttttgttttcttcaaaattaaattcttactgtaaaactagtcaaggcaactgaagtttgtgtttgaataaaagtgtagagttaactgaggatttgtgtattctcattccaagatgagaagggagggagggaaggaagaaagaaggaaaagagggagggaacggaggaagggagggagggaaggagggaggaagggaaggaggaagggatggaggcaggaagtaagggaaggaagtgaaggaaggaaagaaggaaacagtaaaggaaaagaaaggaaataaaaagtaacttcattcctctatagaatctctattaataaatgttattttttaaaaataaaaatacagttatttttcatgaatataaattttagaacatatttttcagtgctccttacctaactcccaaataatccattacttacatttctttttttgagatggagtctcgctctgtcacccaggctggagtgcagtggcacgatctcggctcactgaaacctctgcctcctgctttcaagcgattctcctgcctcagcctcccgagtagctgggactacaggcgtgtgccaccacgcctggctaatttgttgtatttttagtagagatggggtttcactcgatctcctaacctcatgatccgcccgcctgggcctcccaaagtgctgggattacaggcatgagccactgtgaccagcccatttcattctttataaccattatgaattcccacctagtttgagaaccactacttttgtgtggtttccaccctttgtgtgatttcaaaaaggctcgcctttaggcaaaatttagcaagaagtcaagccaatcaataattgcttgaagtcaacttttccagaataaaactgtataagggactttgaatttgaaggttacmatctaaagtttgctttgagatgggaataatacgtagtgttggggattattgtaaacctaagtgatctaattggaaattagaattgaaagtgggaaagtgaaggaggaaaaaatgaaggttggggagaaaagaaagcaatttaggagactctatagggaggaaaggatgagatgcatttcagaaacaaaatattaacgtaaacagaaaaaagagaaagcaatcatgacaaagcctaagagggctagtggaatgctagaatgaactcatttaccttcctttgatatttaggggctctattgcctgctaatttcatcactgttatttttcttacctcttatctttttccctgtagttattatcagcctaatattcattcattcattcatttacctgagttttcaggcttgtgcagagacaacagggtggggccaggttgcaagattgtgttcccaacttggaagtaacgtgggtaaggaaaaagtcacagctggccttagaagacacaagttaaccacatcccatgggtcagtggaagaaaacaagggaataattagaaaactgtgcaagatcagaagggagcccctgaagctataactgcaagaacctccagaccctattgcctttaaatccccttttaaaaggcaccaagtgaggaaaattccaagatgaatgggttacgggtctgaccttcaggaacatgtaggctgcctgccgatgtccacaacatcgtccctttcacatgcctaatacattagcgtgggccactcatttaaaatttaaaaaatttcatttagcatttaaaaattcatttgacagaagagatgtttcaaataaatagtcttcaaaaaaagcccggtctataagtctctgtaacacagcccatctgctttaggtgaagtgaggcagtaggcctggagcctcacctggttggctcttaaccacatttactttccaggagaagcctttcaccaacttcctcagaacctccaaaacaccaaggaacaagatcctgaaattgtccatagtcttaactttgttaataacagactgcatgcccctggaaaaactatttcacttctcttggcctcatcaacaaaacaaatgtggcctaaaatactttgtaagatggtttcagttgtaaacagcctgaaaactcttagtacaactaatttgggcaagtaggtttggctacagataaagaacagaaagacttagacagtggtatacattactctgaaatatttttattatgtaagtacaaataaatggatgtctaattgttacttttcaggtagcaacatttgtaggaaatgcattttgttaggaattttaaaatcactgaacagattgccatttagtttacattttcttctcacctgcagatcctgaaacctctgaacttttcttctgccacataagtcaaatatccatttatagtttttaactcttctctttggcccctaaaaatagaagatcattcctgattttaaaagtagcacttgtatgcatatatataatttttatctttaaaggaatacgctgatgattcctgactctagccagtcctttgcaaccttcaaaggattgtctccttggccctaagatgtaacattgttaaccttttatgacagaatcacgtcaaggaatattacatctcttctagttcctgtaccatatctttatgataagaatgtgtgcttgccatctcaaaatattgaccctctggtacaatcacttgtatctacttgaatacagatgtcttgttactatttctggaaaatattcagtaacaaatttttctctgaaatattgttattaaattttcttaaaaattgtttctaaccttctttactagagctcactataaggtagtctttagtttaagaacttcaacactctctgattttggtttaccattttcatttgtgcaaaatgaatgtgtacataagaatctgtatttccaacccaaagaggcattataatgaccgttaaattttccatccaagaaataaactaactccaccatccctgagtgtataccctgcccttctcactcttgtgttctttaattagacccaatgtgcaggacatgacttgactgaaatttatagccacattgagacatgcagctaaagaaagctcttagaccaggcatcatctcaaacttttaaagcaataggatcatttgacagaagtgtgactcgctatagtaattacacaggtgcaagttataactacttaatctgctcccagcatctctgttgcccttgagaagtatgatgtcctctagccaacatggctgttcatatgggactgaatctgcacatatttgaattgagtttttcaagtttagaaatgtgatactattttacccttatgtgccttccacaatcctactcctctcttaggtggatcagagtttctggaatccatcatctttagttctgcaatttacatctcagacttacatgtttctaggcataaatgcaagaatgacaacatcaaggcctatgaaacttagacttgtatgtatgtgatggtagacattgaagtttgttgcaggaaaatgtttctctgtcatcctaggaaaagcccccagtttctcagttcctcctcctccacacgacagttttttagtttttttagttttttagtttttttctaaaatggagttaagtccaggtgcaatagctcacacctgtaatcctagtattttgggaggctgagatgggcagattgcttgagcccaggagtttgagaccagcctggacaacatggcaaaaccccatctctaccaaaaataaaaataaaaaaaataaaaaaattggcatggcagtaggttccagtagtcccagctacttgggaggcagagcctgggaggttgagactgcagtgagccgtgattgctccactgcactccagcctaggcgacagtgagaccctgtctcaaaataaaatccaattatgatcatacctctctcctgttgatgtccatcagagtctgcaatgccttcagggtaaagtttaaacttccttctagaaacaatgttctgcggtaaaatgaccagggtctttggtattagatacacctggcctcaaaaaatgggtcagcccaggtataaccttccccatcttctgtttcctcatctgcataatggagtaacaaacattgtcaggaagttactggagtaattgtgtgagataccaaacataaaaagcctggcacaaaataaaagctcagtaaatgtaaatgtcctgtcttttgcctttccctcattgtctgcgacttacctttctaggttcctttctcccatgtgcatccccttccttccaaagcactcattgattctagcctgcagtgtatagtttcctgatcaagccaagctctcccacacctctgtaacttttgcgtatattgttcagtctccctgtaagtcttccctaccttcaccttttatagaaactgcagggtacctacttgccccttgagatagctattcctgaatttctcccgaatttaagcattcctcctctatactttcataaatctttcacacacctctttcatcctacaatgtcataatattagttggttttatctgtcttccttaatgtatccttaactcctgagagtggacgctacatcttagtcatctatgaaaccccagaaaatgtaatcaagctaaaatggctcactcatttcctagcaaatattggttaaatgactgaatggatgatacagggggcaaaataaatatggttttagaaaagtggcatggctgctgatctatcagtgcaaaaaggagcacacccacccactacatggccaaaaatgttgaaggcaagagactagatggcttgtgaataatatcaaatgaagttgtctttctgtaggaagtcttagacaatgtaatcttgggaggcgggtggatcacaaggtcaggagttcgagactagcctgactaatatggtgaaaccccatctctactcaaaatacaaaaatagccaggtgtggtggcatgcacctgtagtcccagctactcaggaggctgaggcaggagaatcacttgagcccaggaggcagaggttgcagtgagctgagctcgtgccactgcactccagcctgggcaacacagcgagattccgtctaaaaaaaacaaaccaaaaaaagaaaatgtaatcaagctaaaatggctttggctttccttcagtaaatggttactgtgggaatatatgtgaaatgaatatcaatactatgatgagaaacacatgcactaaacagctatacttctgatgccattctcaaatctgaaactttgcccaatttcagggacaaaagtgaagtaatatgtatccccagtgtttagcttttctcttgccatggatactaacagtgagattcctcagggactgttcctttaacctcgttagggttgctaggggctattgtgcctttcacaacacagcacctgcaactgggaataattgaaattttctgccattagctattcccagcagagtattctgagtcacatagaaagtgtcagaagcatataaattactgatacattttttaatcccatattccctcagggttggcgtttttctctcttgaaagtttcccccttaaggctgggcgtggtggcttacgcctgtaatcccagcactttgggaggccgaggcaggcagatcaagaagtcaggagatccagaccatcctggttaatacggtgaaaccctgtctctactaaaaatacaaaaaattagccacgcgtggtggcgggcgcctgtagtcccagctactagggaggctgaggcaggagaatggcgtgaacccgggaggcggagcttgcagcgagctgagatctcgccactgcactccagcctgggcgacagagcgagactccatctcaagaaaaaaaaaaaaaaaagaaactttccctcttaaaatattcttgtttaaatctaaattaatttcatagataccatttccatttttctaatgaataatactgtatcctttcctatctataccatgaagtttttctttgccttgaaaacccatttagatttatgatttctagcccccaaaataacttttgttcctatatccaattccttccctcacagttctttcacaatagcttcttttctcctgtaaaaccctacataaactccaaaaacatttctagttttggaaatcctaatccaagaggtcacatcactaacgcaaacgtagaaatctttgtaccaaaggacagaggtgcaagggaagtcgggagttgtggctgtgggaaagtgaggaggactctttggcatctgggcagaggtacagggaagccaggatgggggcagaaagaaagtttctcagtttctcttgtgtctacggttcatgcttaggcctctgcagcagccccaaggcaggtgagggtgatcagctgttccagtttgcctggcactgagggatttcctgggatgtggggcattcagtgctaaaactggggaagtcttggacaaattaggacaagttggtcaccctacctttcccttgctgctgctgtccttttaaagtcctcattcctttgaaaattgcagtgatcttcagttcttcgtgattttaactgtatacaaatattcaaagagcttggaccagcacatttctcagagagagctctacttacagtaaatgttatgtgacagagcaggatagcaaatagatgttacctggggcaactctaattgcttggtcatgactgtcgggagtaaagtgttaatagtttcttgcatatcctccaagagagtattacaaatactattctgcaccaagctctttgtaatttaatagtgtatcttggggcccttttgtatggacttatacagatcatgatctagagataatgatcattcttatttgacacatagtattgcattatgttatgtctaaaaacccatttaactctattgatagtcttgtgggtcatttccagtttttactacaattaatacaaataacactgcaggcatccttgtgcctgaacatctttgtgagtttacccattgaataaagtcttagctgtgaaactgaatttaaaattttcataaatattgccaagctgtcttctaaaaagaatatattaagttacaatcccaccatcatcacaagaaatgcttgtatttctatacacactgaccctgagattcacaaaaaacatattttccccatctaatttaattgcaaagaaaattagtcacctttcatacatttatgggccagttccctcctacctccaaagactcattgaatcaattatcttgaggagtttattttttatggatatgttaatgttttgagtatattaagaaaatgaactctcctcatttgtgtaaacttttcaaaaaattttaatttgtttagggttttttttttttatcatttagtcttttaaaatatttgagtagtcaaattcatcctttcagatggtttctggacaccctgtatcttttatgcttgtttttcctggcattcggtgcagtacctatcacaaaatagattctcaataaatgttttttaaataaatggacaacgaatgcatgaataagtgaaggatataatttattcttttcattcctcctcatgctatgtagagatttgcaaaatgaatgccaaaacatatctttgaacagaatttcatggcccagtatcttcaggcagtggtttttctgttttgttcaaaatgatgtccctatcatctgcatagtgctggcgtatgggagatatacgtattgaatgaatacataaatatagagaataatgagataaatagaacgtggattatttggagttcatcctcctgagctaatgatgggcatttctggaagtgctgggttgcaaataagtccagaccagagaggattgtgtttaaaggcccagaatctcaactgataatcctcagaagctcagatttacttttttcattccaagtaaattaaactggagtggtaagaaaaagaaaaatggttatgaccatcaaccccagaaacagggaccacatttaattgaatttataatgtccctaacatctctgctgtgtttgaaaggttaaaaatttcctagagaaaacagcttttgctactacttgccaaagtactcataaaatggactgattgctaagaacagaaaacaaaccaaatcaaaataaaatgaaccaaaaagcaacagaaataaatgtgccttaatgtagttggatgattaccacatctactctcctcagaccaccagccttcagagtaagggcacatccttccaaataagtgcatccttgtcagggacatttggtgaggtgcaaccccttcaatgtgtccgtttcctgggtcatttggggtcttaggaaaatcttcttgttggtgcgcactgaattgcacatgcattatgtaactcattgcaacccaatagctgaactcatggtttcatagctattaaaatatgccacaaaccaaaccacctgtgaggcgccaactcagcaaatgtgccttttcagaaagtagtcataaaaggtacaaaaaatgaggatgaaagaaccctgaataacaacctagagctcatacatttggagccatgaggaaaagtattccatgtaagttgaaggaagatagcagtcaggagcattggtgttgaagaccaccctcactatgagaaagggtcatatatataatgtggaatgaatcagagctaccactgtgggtcccctgttggaaaaactgcaattttggataattatgtgcaagcactaggagaaatgccagatgttagaatccatgtttaatgtgaaaattgcattttgttgtttgcagaacctcaatatatagctttctctataaaatgtgggcatatttctgaaggaaagaaaaatgccagggtttcgttttaacatcctgttacgttttagttaaattcaaaggaacatgacttttcaaagagaaaactgtctctctctcataaaatagcattaagtggttccaaacatatcttaggttataattgaaattggactctgtggaacaaaattaatgatggtttgttctcaaaggcccattgtcccgttgattttatcagttattctttgttaataaggtggtaatgtggtcttaagagcttccactactgagagaatccaaggaatcatagataagtaaattgatgtcaaatattatgactttttctctttcattcttgtactgtatctagttgcctcatctttttttctaaatctcacagtttttgatcaaattccctagggacagcttacatgctagctttatgagggaggtgagtcatgcaatcccaagaaagcaaaagtggagttgagggggtgaaaggaacagcagtagggaagaagagaaaccatgtacaaggtaatgcattactaagcttgtcagagcttcccaacaacaacaacaacaacaacaacaacaaaactagttgctaagttacaagggacattgcctgtgaggctgtgtcgtaaaacattccacatggagaagaaagggtgagcaatttttctgtgcataggtcttttgtctctcattggtcaaagtttgctccatggtacccttggccctcccagagtccctggggaatacagagcctttgtccatctcacgtgtagctggatggttcctgtcaagtcagaggccattgcccacgctaagcccgcaaggatggggaggtggaaaacatgaggcaattgcagtgataaccgctgctttactggggctgctgtggcatgcctgggaaactgggagagtggcttatgcccaaggggtagggtgggcagagctgacctggggaggccacaaacaggacctagtgtacttttctacagtatactagcagaattagaatgaatcagacaagagatttattaaattaagcttttgtaatgtcctgatgtagtgcactgtattttaatgctgtgtcttctgttgcttgagttcctaatttgtaccaggtgttgtgccaaatgcttcaaataaattaccttgtgaaatcctcacgactctatggactccaatttacaaatgagaaaactaagacttaacttgcttattcttcaccaaggctaggaagtggcagagttaaaatttgaatccaggtctaaagccattggtcttctatgccatagaatcggcatccattttgctactcttactagaaaatcatgaatcctagctatgaattgtagtgaggaggaaagttttttctgtttcatgtttatgaaaaaatctctacctttttcatttttttggttggttttcaattggccaatggttggaaacaggcaattttcagagattttgtgtaagagtgtgtgtatatatatattgtatatttacagacagaaaaaaattgagattaatttttcaattctctaagtcataagagaatggaaaaacagaaatggacaagcagaattttttatcccaatgtattctttgacatacactggtcataatgctaatgttagcaaaagaaataaagaaatccctggtgcaatgggatgattgaccttcctttagcagaacagtgttgacttgttaccgttgtcaaatcagactgaacacattcaacaacatgatcatttctacttgtgggtttggactgacaaggacatttctagtatatcttgttgacatcaggttaataagctctaagcaaagctgaaaatgaatgctacttcccacaatcaagtggaaatgttaatattatcaacatgtcttaaaggccatgaagtcctatgcctgtatatgtaacaggaatagcaaacaggaacttttcttaaagggaagattaaactagtgttatttttatgtattcgttaattgcatgctccccatttttaaaactgtacctgaaaatatactgtaataaaaaattaaatttgaaatattataccattgaataaggtcctctggatagttttgagatttaatattctttatttcaatttacatgtatactgaatcacgtaaaagttatttaggtcagtacttccccacatttgttccttcatgacatacgctgataactatatttctacgaaaactgcagtaaataaaggatgtggcttgtgttcagtctcccacccactagcgacaagagccaagggaaatcaatagcttggctcacctgtcatctccactctttggcacaccattgagaagtctaatatgtgcaaagaaaagttaattttactttcaagggttatacctttgcttattccaaagaacggtgggggagtgtaccagggccattattataatgtatattattaaactttttacattttaactgatttctcttatagtaaaattaattatatattagctttggggtatacaaaattgcactttgataataatatttaggaattggcaactttgtgggcaaagttgtgggaactatcagaaaagtaaaaaataaaggtgggacccgaaagaaggaaggattgtaggttggagccatacgcgactagaaactaagacatgtatccttaaaaaccctcaaatctgtgttctgatgggaaaaccctgctaagtcaatggttcccagactttggaatttcaaaacaaaaaactgtgaggcccaacatacaattaccaactcttcatttttgccaaacaaaactattttcaacagaacacactaacatatactggaaccatgatttcatattatgacatttattttccacattctatatacttttaatatgcaaaacaaggacaaaaagggcagtcatctcccatggggggcttagaaatctctcattaatgtgtgtgtgtgtgtgtgtgtgtgtgtgtgtgtgtgtgtgtgtgtgtgttttaaattggccttattatttctttaaatttaaccaagggccagtaaaactcccttttggaataccacacgcccgtgctgttcaggaatgattatgataaagtcattcatgaggacatagagttatttcatatgctctcaaaaatgacttgcagtgcgaaacacagctactattggacaagacaacaacccaactttatataacaattttttaattcactagtacttgtgtatcagtcaataaagtacctggtacttgtgtactaggcactgggatggagttggggatacgaaagtgaaaaatatagtcacaatttctaccttatactctagtaggggaaagaaaaacaaaatgtatgattgaactgccttaagcaccatgaaggcaacatacaaattgctgtgagagcatataaccaactcagaaatcagccttaaactgagacctaaaaaggactccccctgtgccttttgtatatttaaggcatcttttttatattctagaaatacaatatcattgagcagatagattccaaagggccatcttctagctggatgaaatagaaaagggcacccyttcctcaggctaacagccctgcctgctgagggcatagttaggtgaatggatcatcactaatgaatggatggttttaaagaagggaataacatgaccaaatttgcatttaactttactcaatagtctggagtatttaaatatgattaaaccttttctttccattcacttgaatgaggcagaagggctattcaggaatttaaagttgactaaggtattgattgggtacaaaatttttactaggtaggtaagggcaggatgattccattagaaacaagaactttttctccagtgctctgggaagaattgattggttcagggctaaatcaccaagatgaataccttcttttgattcacacacccttttgacatctgggtttccctgaatcatatgcaatctaggacttacgcagaccactccagtttcacttacgaaatttgggttagccaacttaaacagtcatggctgtaatttgcttctgagttaaaatgctattattattttatgttatttatggattcctgcaaaggagaaagcatttttattttgataaattttgttattaatgaaattaactcaattttgtagtaacatagtatacagtgaaaatgtgctttacgagatgccgtgggcttgtctctcaaatggacaatgaggctttccgaaacctttgtgcctttaagtttaaggaattgatttggcgtcttatctcagtgtacacaaagcttagttatcacctaggaaatattggatgtttgtctcagggagaagagacaatttttgagaccacaattaggttttgtagctatttgacatccaattataatcagatactcagtgaaacatgcattcataatgcaggccaatgatcatatatttggcttagcttttcactagaaaaattctttaaagaaatattgtccttccaattttagtggtactgaggaacagctctggttataaggggggaaatactatatgtcctttgttcaatcttactaatctttattaattttatgattttccccatttattttttaaaaatcattaataaaattatccttgattgagtttctcctatgtgctaggcattgtgataggactttagtaaacatcatctctaaccctttcaataaccctgcaaggtagggtcatattttatagataaggaaactgaggctcagagaagttatgtcttgaaattatatagtagcaagtggttaagccaggtttccaacacaggtttgtctgactctaaaaccagcatctgcccccatctcctcaccattcgcgaccagaatgtgatgcacgtctaccaaaaagagagtagcaaaaggtgatttatagaagcagttacagtcctctgaagagaaggcaaaactattggggatagggaaaaagtaactataaagatcatatttatataatcgaatattaacttaatggcttgaattaggtggcaaataaaatatattagcaagcaatgttacaaaccatggtgagagctatgtagtagatgaagcagaatgatggctgggctcagggagctcatacatttggaacccagataaatctttgctccttcttcccagagcccatcatcactttttaaaaacacgtctttgctgggctcagtggcttacatctgtaatctcagcactttgggaggcaaggcaggaggattacttgagcccaggagtttgagaccagcctgggcwacatagggagatgctgtctctacaaaaaataacaaagaacaaaaccatctgaatttcatgcattccaacatatattattttgttccattctacttaataacctttacactagttgtgaaactcactgaaaacaaaggagaaactcattataattcatctaaacattcctgaaatatcactttaatcaaaaaattaagaaatattgctcagatttaaaagaaaaatggaaactcccttggcaagtgggtttgaggtttggtcattaggttttgaataatcaggagctatgtgttgtagtaggaaaagcataccatttagagagagacagctttagtttgtcagtcctgcctcttaataggtggatgaccttgagtaaagcatgacgcagcctttgggcatcagtttcctcacttaaaggtagaagggttgaaccaggtgtaagctgctgttcttccatgttatgattctaaatagttctagatggaattatgttgcacatttcatatgttgttaaacagcttctctctggaacagttgctcctaatctcctaataagcttactatgggtcactcagcaatcttcaagagaaacaaacattatttggttggtggataccaagacaattctgatgtgtttgtgtcaaagattggtcagatgaaatctaactagacatgtatcattccatcatcaagcgaaatgaccttgactctaaacatcttaatttgaactgtagacatttcccaaatgctttagggtagatttggaccataatacactccactgtaaatggagaaagttcatcatccccataataattgcccccaaactgctaggtaggaatgcatactgggtttagtatgtattaactcccttgtgaattcagcttttgagagcagacctcttaacaagtcatgagtatttagagtgaaatatttaattcttagtgatactattttcctattctgctattattattcagctatgattattttccttctcctcccaacctcctatttctttttctttattaaaaaaaggagaggaggtgcatgctgccatctggggtgaatatgggcttcacgtggggacctgggcgctggttctgatccagagagtgagctaggagcacttacacaagagggtcttagccactgtgtcgggggaatagccttatatcaaagactgaagccttttagtaaaacctgaagaataatcagaagcagcattgactagtctctaaccttggttgagggacacacacacacacacacacacacacacacacacacacggctctgaaagctcagacacggaggacacgctgtgatccacttagccctctcttctccttcagggggtcccttgcaggacagaacgctaaggaacaaagtcttaactggcaagctgccggcagaaggagactgtctggtggattgcagcgctgattaggaacggggagtcctttgcgtttcagaatccggtccacattttgctgagagcccaggcactgtgaataagaggagcctctgaggactggtttctgatgtcgcactaggcatgataagaatgccattgacgtcagcagagtcatcatcagggagaatggcaccccagctcttgaaaccacaccaagcaattgcagtgcttttgaaaattaaaagccggtgctggagtgtggggggtgaggtggggggtgggggggtggggagggaaagaagcaaagagggaagtcgtggctccagctgaactcttctttcttctatgcgtttcctgtattttaaaaaggcaggctcacggccctcctgtgcacacgcccgctcactcacacacactgctgcctgggctcattaacctaaattgggggaggtgggggaagaagaaagagagaaagaaggaaaaaaattaattctgttaacacttctgcatgcacataaaacaaactgtgccacccaggtgctggacagaggccctgagccacataagcctctgagaatcaaattgctgaggtaaaactgatatgctttaaatgtgtgttgatgaagagattacaagggaggaattaaacacttcaaaggagctactacaaagcaacaatcactcttcccccatccctcacacacgcacattactgtggacgcttgcatgtttgtgtgtctgcctgagaaaatggcaaagttggtttaggaagggaacactgcaggcatgttgtgatttcagctttcacaggcagctccaagaacatcacctccagctataattcaacggttacctggactggaaaatgtcttggaggttacgaagtctttgaattctttagtgtaaattgtctccgctttgaaattccacaattgatcgaatcctttcattctctttcccactcctaattgttccactctaactctccacccaccgccaggaatatgaaaacaacatagagtagaactgatgatatcagctgtataacacgctttattttacggcattaatgggcagctttccaagtccataaaaatcttttgctgatctgattttaatatccatattcttcagttatactagaaagaatgatttccgagatgtggaaatgttagccgggaaacaaaaggacataggcacataaagcaaaatctggcaggaaatgtgggtttaataaattgaattatgtgaaactcctatttcaaatggactgatactagaggagcagccctcgagagatatgcacagtaatgattcttcgttttcaaagacctgtttctttttgaaaaggaagaagccctgaacagcattcctttcaaatacacaaaggtagctaaagtacaaccttctcctctttcctatttgttctttaaaaaattgtaaaaattatattaagtgtgcttcttgtgatagagtcaataaagggagaaggagtttagcaaagcacatttactatatactcttaacccgtcttgcttactgtaataatcgaaagaaagatggctaattgtcttgcaggaatttgggttatcctctgaaaggatacaagtaaatttgtaacttgggtcgtattggctattttttgttctcttttgctttcatttttgttttgtctgaggtttataaatggaacccttctttcctttcttccttttttccttccttccttcttcccttccttttttcctttcttccttgctttctctctctctctctctctctctttttttttttttacaattgtacttaaaagaataaaggattctgaaaatcagttccaggatccaataagggcctagattgtatatcacaggatcagagccccttgctctcaaatttatgattgtgaggatgtattattgtatttgggggatcaataagcagagccagagccttcacacaaggctccttgtgccccctcccccgctccatcccatgaggttaaaaagcactgactttgactttaacactgtgaacaaaatacagaacaactgtttcaattcccttcactatttctgctatgtgcctagattagatgttttctgacctgtctccctaagttgttcctgtcacttgtgtctgtcattcgctcccccatcgcatcctgcccaaccctccctgtctatgattcgaattgctctctgtccagatcatttcctgcagtgaaaaacgaagaaagactttctcccttcttcccacctacacattccttttgtcccccaagatatcccttcctcttgcctggaatcttcccaggccttaattgattgatttaggccccctttgcaccaggcaccctagcggaagcccagaaagccccaagagtctggatgtgttttggagagcaggctcaggttcactgcacactaatttgcagcaggaagtgctaggaagcccgatgagggatgggaattagcaaataaggttggcagtcaattgacagaggaagcttaaggaagaggatcattttgaaaaggaaaaataatttaatccttttcaggtgtgttaatttctttcgtggaccaaattaccatggacctggaatagttgagattttccctaaggtctggctgtacttcatagggaagaagcaagggtaagtgcagtaaatttgattatggacaccagtctaactctagcttaatgagccatggaaacaaaatagctcaatctcttctaactgctgtaatgcaacactaggagcattgagagcactgtggttttggttacacaaatttgtagtacaggccttgcctcagcatttgaacatttcagcaagagagctgaacttgcttcgttcttcatgtagcagatataagtcttttggaattaatttgaaaaaaaaagaaaagaaaagaaaagaaatgtacccagaaagcaagagatcttaaatgtatccaaaacctagaacaaacaaacattaacatttgccataattactgtgggtgtttttaataaaaatatatagatagataattttggaggttgcatttccccaccatcactgccagcctcatttttcttccatcctctccagaacaacctctgccataaatttaggaaatagtcaacctgttcacattttcatctttttactatatatgttcttattcacaaacgaatatgttgtagttataaaaagtcatcagtatcttttagcttatttttttaaatgcaacattatgtttgttggatcattttactcttgtcccagtgcaccctgtaattcccatgaattgacaggtagcgatagatcagcagtagtaaagtaactgatatgggtaggttaatagaatgacccttttaagaagggatctcaaagagggaggctaggtaagctacaaaattatcagggcgaaatgcagtgaggtagaagtgaaagcagcttagagtcagcctgggctaagataaatgaggagtggagctgcagctggaggagcaagagaatatggtctactcgagtataaatcaagcttgctggtgagcagtttaggactagctcctggttttacagcaagactttttatgtgatcttgaccaaaccactgcacttgattgctcctttctactccttggtcctcacgtgtcaaataaaacccctgaattgcagagccaaaatgcaaacaaatagaactcctcactcaacctccctcagtttataagtaaggaaatgaagacctagtaaaacattataacttacagatacctgtcagggcagaaccagaagctggacttgggctaggaaaagttgttcccccctgattacattttccaaaggttataccttttccacagtttctaaggtaacatgttgattgacttgacagttgtagaaatattaggaagtggtataaagccaagaccatgtttactaaacagtgctgctcttttttttacatcatacagatgagaaagctggtgctcagggaatttaagcaacttgcccagagtcacgtagcttagaagtgttagagccaagatktggaccccagtctttctcactttcacagacttgcttttaaccactgtgttatgctatgctgcctcagtataagctcctttcaaacaaaccacttccagtctctgacatgcaagcccagaagttttcagatttacaatggcatactttttttctatctgctaagtgttagatgtcacggtgtctgcaatggagtagagctttagaaatgaggataaaacatttggtttgatgttagtattaagaactccaatatccaaggcaggaaacttggtaattaatattttaaatggactggaggggtcacaggtattaaaatcaatattttgatggcaagataacaatgtaggaacaaataattggagatgtttagcaaaattatgaattaagtagatgtataaacggcagattatgaaagggaaacaaagattacctgggaagagttttgtgttttagtcaactgaattaccagaatgggcagaaaaaggaagtatcaaagaagggtctgctgatagaaaattaaataaagaagaagatgccatggaaacgtttttagtgcaaatacactattgctcatggctgaagacagaaagaagactatgtgtgacttccagatgaagttcaggcatagaggcagggctaaataaacaagcacatagacccgagaattctcgttgattgatctttggaaattcggtataaatatgatcagttcaaccatgccttagctactggatcaaaggagacatctaccggctttgggagataggaatctggaaaattgacagactgaaaaaaccaaaaccaaagaaaaaaaaaaacaaaaaaaacagagaatgcagaatgccattttaaaaaccctaagaggctgtgtctgatgttacaggactctttgactccattagtctcaattctaatatttaagttaagtgattgtgggcatagaatttttttcaaaacctgtttcgaaatgaaggcttcccatacattgaagttaaaagtggtcttgagaaaagaacttcttaataggtaaggggttttactttggaatgttgaaaatgtttggaactagatagaggtggtggttgcacaacattgtaaatgtgctaaatgccactgaattcttgactttactatttttaagtttatgtgatatgaatttcacttcagtaaattatctttgttggtgcataattactgtatatatttatggggttcatgtgatgttttgttacatacacaatatgtataatgatggaatcggggtatttacggtatccatcacctcaagtatttatcatgcctgtgtgtcctctttctagctattttgaaatatgcaatacctgttgttaactctagtcacctaatctgctatggaacattagagcttattctatctgtgtgtttgcacccattaatcaatctcttcatcccctcccctcccacctacacactcctcccaggctctggtatctatcggtctaccttcatgagttcaagttttttagcccctgcatatgtgagaacatgtgatatttatctttctgtgcccagtttatttcacttaacataaagatctccagttccatccatgttgctgtaaatgacgattttattcttttttatggctgaatcatattccattgtgtataccatgttttctttctttcttcctttctttcttgctttttttttttttttttttttttttgagatagagtcttgctctgtcatccaggctggagtgcaatggtgccatctcagctcactgcaacctccgcctcccgggttcaagcaattcttctgcctcagcctcccaagtagctgggactacaggcgagtgccaccatgcccggctaatttttgtattttaagaagagatggggtttcaccatattggccaggctggtctggatctcctgaccacgtgatccgcccgtctcggcctccaaaagtgctgggattgcaggcataagccactgtgcctggccgtataccacattttctttatccattcatctgttgagggacccttaggttgattctccatctttgctattctgtatagtgctgcaataaacttggggatgtaggtatctctttgatacaccaatttcttttcctttggataaatacccagtagtgagattgccggacatagtggttagttctatttttagttttttgagaaatctccatgctggttttcatagtggctgtactaatttacattcccactggtgatatgtaagagttcccttttctctgcatcctagccagcatctgttattttttttttattttttattattttttgcatttttaataatagccctctaactggggtaagatgatatctcattgtggtatcaatttgcatttccttgattattagtgatgttgagcattttttcatattggacatttgtatgtcttcttttgagaaatgcctatttatgtcctttgtccacttttaatgggattgtgtgcttttttactattgagacgtttgagttcctaatatattctgaatattattcccttgtcagatgagtagtttgcaaatattttctcccatttaatagattgtctcttcactctcttgattgtttgctttgctgtgctatacagaaatttttagttcaatacagccccatttatctatttttggtcgtgtggcctgtgcttttgaggttttagccataaaatctttgcctagaccaatgtcctgaagtgtttcttctgtgttttcttctagcagttttatgtttaagtctttaatccatcttgagttgatttttgtatggtgagagataggggtctactttcattcttctgcttatgggtgtccagtttttccagcatcatttattgaagagatctcctttccctaatgtatattcttggtgcctttatagaaaatcaaatgtatctatcattatgctctctgtctactctaaatctatcagtccactctgtaaaaatgtggatttgtttccaggctctctgtattattccattggtctatgtgtctgtttttataccatgttgcttttgttactatagcgttgtaacatatcttgaagtcaggtagtgtgatatattcagctttgttctttttgctcaggattgctttggttagttgtgctttttttttggttccatagaaattttaagtttttttttatttctgtgaaaaatgacattggttttgatagggattgcattgaatctgtagattgctttgagcagtacaataatttttttttttaaagagaaagggagaaagaattgggcactaagtacatcagagtagatgtttatcaatttttttaaaaatggtcttggctaccataaactgtgatgttcttgagagcttacattgtgtcttgttgattttggaattgttgatactcaaagtgcctgacacatagacttgattcatatgtatttaatcaatgaatgaatggataactctgacctcctcttagtgaagtgcacgtcatggggctaccacttgactatatgctgtgggatagatcaaagaaaggtaggacacaaccttgaacaaaattaaagtaaccttcagcttgtttataaaaagtgttctggtggagaaataatgaatcttttcagattttagagtgttgctgatttgatttcaatttgcatttttaaccatcagtctctgtggaactttagtttataggtaggacttttgattgagcttggtggctcacacctgtaatcctggtgcttcgggaggccgatgtaggaggatcacttaaggccaggagtttgagaccagcctggggaacagactctactaagaataaaaaaattagccaagcagagtagtgcatgtctgcagtcccaactacttgggaggctgagcctggaggatcccttgagcccaggagtttgaggttacaatgagccatgatcccaccactgcacactggcctatgcagcagaacaagaccccatctcaaaaagcaatgacacacagaaaaagcagaattttaatttgttctgctcttgtctctagcacttcatatccatttctctgaatatgaacagtgggaaaggtagtggaattgaaatggatcatagaatgtttcctctactgataatttttactccatttggagtatgattgaagagctaatgtcaagatgcacagcaggactcaatgattgaaaaatagtgttactgatgtaaaagtcaccatattttaagctttctttatgatagtcttccattatttcctttgtcatattagcaccactggaaaaacacaagttatacgtagggtagaaaatgtaatgacaatttggtgttttataaacaataataaatcagctttcatgaaattaggctatgtcctctgctctggtgttagaacttacttttgcctgagctcactaaataattatttcaatttcccagataaatgtacttctgtggacagaggccatatgctggtagcccctatacaatatatagagagcataaatttcctcttctctcttggtatttaaaattaggatttttataaaatgcattttattcttattttgccttctccatcattagaaagattcctggatctgtaaaccaaaaataatagtaataataatgataataagattttggcaatttaaagagaaattcactttcgtgaatatggtcacgccagctatcttttgaaccttaaaggaggcaggaagaacatttgaattaagaattttggagtattacaacctcatttggttctcagaagctttttttaatttcatcttctccacgccagtttatacaattctctcatgcctcactttacttttatatcttttcttaaaaacagtttaaattgtatcctccccaccccactttatacaattctctcatgccttactttacttttatattttttcctccattcttccttgtttcattcattcactctcccaagtcctctggcctaagttttatttgtgtggtattaagcagagaccaacagaacaactgtgaagacttcttggggataaaccaggtttcacttgaattgtggtgcgtctgccattggtgtggaagcagggcagaaagaggacagaggcataccagcaagtacagacatctaaacacaaagagaggagaacaacctcagggatactccctcagtgcctgggaagaaagcaaaacttaaagtgctcatagaattgtaaataaactctctcctctttgaaatttatgttcgatggttgctgtgtagttgcaacagtgtcataaagtccatgaggcctattttttttgagtaatcaatattgtggaaaagtgctagagcagacctaccttatataaattaatttgtttgaattgctctattcactatgaataaatatttattggagtaccttctatatgctggggacctcagccatgagatacgcaggtggaaaaaataacacttaagcagcttattgtatagcagagaggtggttgaattgatagacaattaaaatacaacgtgttgaaaggcctgttaaagccacagggtcactcagtggcaggagggattcagtcagcctgggccagccatggcaagtaagtggcctttggaaagttaccaaggtaagacatacctgatacgttcaagaaacaattccaaggttcaataaggccagaagttaaagggcaatgtaagccctggaaactgaggctagaaaggtagaaggatctctttttaccacacactgtgccgggcaccatgaagaatacaaaatagctagctattatggagcctacactttaatgtgtgtacatagatacatgtccatgttggaatttaactccttgagaggtcatgaattacttagtcccggaagcatttgaatttatactggaaagctatagtagagagttgacaaaatattttaaatgtagtaagaagaatttgacaatctattgtgtggtatgctagcaagccagttctccttcctccttttctcaccatcccaccacccctcacaaaawaaaaaaaaaaagttaaaaacctgatctgcagtgtttgtctatggccatggtgcaaatactcctcccatggctggttccaagctaccactggttcaacagttcttttgcagaattcttgaatctttaacacttaacaagatccagttccagcatattcctgcaacagcgattctgcagttctcaatgtcaaataatagaaccaaaaagtcatataagtactacaaagaagaagagagagttgagagccagcttagccaggaaatgctccagggggaagtaaggcttgagttgggacttatagataagaaatgtaaataaaaaggaacaaacactcccaccgtgatgcacaaatattggatcatgtatgtgtgtgacaagtgtggccgtctgtagtggagggtccaggtaaaatttaggccatgaaagccttggtctgtcaaactaatacattttgttacattaaagttagtagacagccattaatggtttttaaaaacagatggtcatagcaatgttttgacaaaagcaatttttaaggaagattttgtttttataaaaagttgaattattgatagcagtgagaccccagaatagaataagagacctgcctcatgtaagtgagagtaattcaattcagcagtaatcttggaaatttgtaacttctgtggtgagaaattgtatcctgggatgttgggtaaagccactgtgaagccaaagaaattagtggctaaacgtagagaaattaagatgaaggaactggcacatggagccactgtgtactataaagtatttttattggtatttagtcttgctgttattgttgctaatgattgtattgaataattaccagctgttgttagttatttgaaattaggtgcctaaagcaacctctcatcttgcagaaagtcatctttcttgaaactttttaaaaacttgcttgaaacatggagacttggaatgggacgtctatcatagtagcacatctgaaatccttctcattcctgctgtcatttctgtcctttcgcagtccactttgtcaccacccccaccattccttgttctgcctgcaatccagctttccagtcactttctctacttcttgcctggctgcagcgtcatcatttaaacagctctgggttggtatctcctttcaccagaattcctgcagccgtggagtacgtgcagagcatcttccttttgaccctcttaaaatgctgaggggtgtttccgacacacattgctttgtaattcaataatagggcagttgtgggttctttttattgcagttatgctgatttttaaaagcactctgagtaagaaaggaaaggtagtaaaatatacgtgtacctcgatgctcattgatcacgtttgcacatgttcttgccaaatgttgtttttaaaacctgtctctgcaggtctgagctgtgaaagtttgggaaatcagggtcagaaggcaaaaaaaattcgtttgtatcatcgtcatacaatataaattacatgtagcatatacatagaaaacaatccaagggatgagcttcctggaaatcattccttcttgtttactctgattatataatggggaattgtatgctttatacaattttaatttcttgaatatatgtgctcaaaaaacattataatgtggttcagtactatatatgctgaaaacaggttgctaatgaatttggacaaagattcccattttatttcctgtacgtttacacattttttggctgtatattatatttactatatatatttattaggactacagcaaacgctaattcatcgactgagataagaaatgtgttttccattaataattataaatctgccagaagattgtgagatttacattgttggggatctaaacaaccaaaatcattgcaaagttattttaaaactattattaattatttatgtaatcatagattatggcttgcagaagactgaagaaattgttcaacaaaccatgtaggttttgtggaagagcagtagactttgataagtaagctcagagtggtccattaaccttttctctatatgtacattatgtgttgataagcatgatatctattatacctcaattattaataacaatatacatcctaactattaagaacttagcctgcaaccctaatagtgtcccctttcttctagaacatagatcagcataaggaaggaagcaaaggaggtctctaagcactcaaaatagatgttcacaatgttcactcactgaagataatgtaggtcattagccagagaaatgtatgttcatattttagtgatgattcatacaagcttggtcatgtggttctaaaccttctataattggatgaagcaaattaagaaaggctgggtaggagatttcagggaaagtcacaactgatattagccaaatgtcagctgatggcctgaaaacaacaacagaaaaagaaaatctacaaaatcatttgaaaaccacagacatagctatttggggcctttttgaaaggggcaataagctcaacccatctttggaaacactgagcgcatcctgtctggacaactgagtataatttttggtgttcaaactgatgaccccaaatcatcaaaaaatacaaaattatattttgctcaatctgtattgctcttctatattatggtaagatttctgtttagtgcacttaaaagtaagactacccccaaatttaatccccatccccttcaatgtctcctcctggacattgctccatctatcgccccttctccctctttctttgacctactctttgatggctgcatctccttcaaaactggttgaagttcctaaggaaaaaattcccttcctctttgatcctgtatcttccatcagttattaccacatatctctattgattttcgcacccaaacttctagaaagtttacacttatcattttctttttcttttccccccacttattcctctacccccttgaagttagcttgcagccccaccactctgttgcaactactgctgtagttcctctgctctcccaattgccaaaccaagtagatatttttcagttcatttctcatcaagtttctctaagtcaattgccagtgtatccctctcaaaaacctttccatctttgcatgaggtcgtacactctttcttttcctttccccccacccttcctttgacctggggttcccaggatcccattctccattcctgctttcctcactctgtgtgtcttccaagactgacttgtgcattcttattttaattaccacctgtttgctgaaagcccctaaatttatatagaaatccatcttaacctcttctgcaaagcttggaaccccaatatttattggaaattcccaactgagtatcccatgggtttataaaattcttcatatccaaaaccaaatttagcttttcctctaaatttgtgcctccttatatatctcagttggtgacactacccagctatcatgttcagaaaataaaataaaaatacgtcataaaagcatcaaaactctataaatttatccatgtaaggattgccaccattaatatatactttaaatccttccaaatgtttgtatacttgtatatatttaaagggatcatatttggtgacttactgctataacacatttttcccatttaacaaaaaaaaaatttttctgcatcaaagtatacttcaaaattatttttgtagttgctcatgttctagcagttatttaactaataatgttaaacatttacatcatctttgcaactttatttctcttgttgcttttttcttaagaaatgactattgaaaatgacccccaaaagggtatataatatcagtgataaaaattagctcttggaaagggaggagagaattttctagtgtatggtagtagcagtaacagtggcctagttacactcaatatctcaatatgtaatgccatttatggacagcttactatgtgccacactctttaaggactttgcataatcctcaccacaaatctgtgagattggatacattattgttcttatttcatagttgtggaaactgaggcccggaggagtgaaatactaggccagggtcacacaagtagtaagaaacagagccaggagtccacctttggcagtctgtttccaagattggtcacctaacacaatgcttatctgccttttgttgtaccctagggcatcctttctaccagagtgtaccacttcgctttatgtttcttagaataaaaccaataaatagtgcagttagttagctaagttttcagaaattttgatagatagtgtctagagaaacaaaaaagacacaatttctaagatgtagtaatgaatgtttcattcatgtcggtgattattttgatttgttgatgtgtttttgataacagagtaggcaaaaaacataccatcaatttaataatggaatcctaagtttaggtttaacatgatttttgaagaagaatcaatgtgcaaatgttgatgtattttcagagttatggttcagaaatgtgaattattcaaatctcatatcagaatctaaatttttaagaaaggaataatagaatatagtaggtcccctaccatcaattctacttctgtacccctattttatcattcatatttggcttgctagtgaagatgccttgtatctgttgtatcactgggtataatgtctggcatttgcaggtgtgcatgcaaggaaggaaagaaggaagtgagggaaggtggaaggaagagaacaaggagggaagaagggaagggtagacactttgggaggccaaggcggttggatcacctgaggttgggagtttgagaccagcctgaccaacatggagaaaccccatcgctactaaaaatacaaaaattagccatgcgtggtggtgcatgcctgtaatcccagctactcaggaggctgaggcaggagaatcgcttaaatctgggaggcagaggttgtggtgagctgagatcgcgccactgcactccagcctgggcaacaagagcgaaactctgtctcaaaaaaaaaaaaaagaaagaaaaaggaagagaaaaagaaaaaaggaagggaagggtagaaagaagagaggaaggaagggagggagggttgaattatagatttccccaactgcctcccacacaatgtgctctaaccataaattcttcatctcagttgctcaggccaaagcttgagaatatccctgtgtctactctttttagaacatctcgtatctaatacattagaactcctgaagcctctgctctcaaaatatacccagagcccagcatccttgtcaccatctccatggttaccatcctattgcaagccaccatcttctctggcttggatgattgcagtggctgtctaataggagaccctgcatctcctcttgctgcataacagtctattcaaaagacagcagtcagtgcaaatcatgtcattcctctgctcataaccttgcaatggctcccatttccctcagagttaaaagtgattattgtggcccacaacgtgtagcccaatttgacccctgtttcatctctggtcttctttttaactcttctttctctcattcactcagctccagcccattagcctccttgctgatcttcaagcacatcagtcacacttccattttaagaccttggtgctgcatgaagtgctctttcccccggtatcttagggccaattccattgctttaagtctttgcttgtgtttcatctccattaggccatccatgaccatcccattttttaaatgcatcgcacattaataccattcccaatgtctgctctattgtatgtatgagtgcttgtttcatagcatgtctatccttctaacacataatttactatatctattgtttattatctctctcctgtactagactggaaactaccatgtggaacaatcttcgcctattttgttcactgatacagatatatatacacaacagtgcctcagccatgctaggttgctcagtacattcttgaataaatgaattatcgatgtactcagttctgttacacagatgatttggcttctttggtttcccattaagagccttgttttctttgccaaataattgaaagtttcactcagaagataaggaacatcaaagacctcaagctttgtggtcttggaaagctgtggctttggtctctgtctcattccccttgggatttagaatagaaaaatgcaggtggagaacacattcaaacatcccacactttatcagtattttaaaagaaagaaagtatggctttttttttctcaaaacaatgtcttagttataaactgaatttgtataaatggccagttgtacattagggcagttgcacaatagaaagcatccagggaacaatcataacctcaagagcctattggaaagtgggatcctaaatagctttctatgatctccctagaaaactgtagaatttccccagagaataagccagcattttgttgaccattctgcaattccaggatcatgcttgcatagtcatagcttggaaggaggcaaattgaaacaagttgaaaatctgcaggaactatccccagtgagaccacagaaaagccagaagaagaaaaggtgggatttggggtagagaacgagccacttctcactagtttgcatgaagcattgaatatcccaagggagaaaacattgaagttctatgagacaccaagaaaagtgtatagattatcacagcatatggatagaggtcatttgttccctccctccctttaaagaaaagtagctttgcaagccacagtttaggaacaaatggactttttgacatagttcaaatcctcctgggtgtggaggcattgacaggagcaatgtcataaattggttaaaggttgcagtctggaatcaggctgccctgaatcccagccctgccatttactagctgtgagaccttgtgcttcctaacctcagttttcttttcttttcttttttgagactgggtctagctctgatgcccagtctggggtgtagtggcaccatctcagctcactgcagcctctgcctcctggactcaagcgatcttcccacctctgcctctcaagtagctgggactacaggcatgcaccaccatgcctggctaatttttgtatcttttgtaaagatcgggtctcgccatgacacttaggctagtctcaaactcctaggctcaagtgatccacctgcttcagcctcccaaaatgctgggattacaggcatgagccacggtgctcaactaacctcagttttcataatggtaaaataggaataccgatagcacctcccttggtataaggattaaataagataatctacatagtgcttgaaacaatgcctaggcagtgttcatcaacagttagctgtgtgctgtgtacatgctggagctgctaccttgtagaaattttaaatttaaaatggtgtgtagttggaggttaggagttactaggggtatcgcctagggaaagacagttggttacccagacaggtccttacagagtagtgttttccctggagaattaactatattccagaatctgtcctcaaccaagcagtctcagaaaggtgatcttgtcacagcctctgagtaagctgattcaaactctcaaaagctcacaagagccttaaagccagagtatcagctgattccttaaaagctacaaagtgttttggccttgccaacatacgcattctccctcttatgggtaggtttagaatgctaaatagtacataacatggatttagaatagacagatttacatatgatcagaaggctcagtggtcatagttttgagggcctaggacatgcatgtgagcagtagggagatcatcacaggaggatgggcacactctcgaggctcatacaggcgctccctctctccatgggcagcacaaggcaagtctcctttgtctttgatttacttgccaaccaccctcattctaatgggaactttctttttccaaatatgttaacaccttcaagtaattactgtcagcgtccagcctgggagtctcttggacacagtttttcataactctagatggatctcataatttgcccctgaaagatggtaaataattttacttctcttacttctggactctaagggggatacttcactcttgctccttgacctctcctctctagatcccacaagccaaaaattgttggaaaggattaatatgagctgggcccaataggctacagcatgcaccagcccctaaagccagctttaggattgggcggagtgtcagcccagcttccaccccacttggcttattcagcgacctcctgcaattgtcctctgctagcccttggcagatcagaaatgttctaaagattgacctctattactttgggctttccttaacttggcatccatgaaaagatccacttaaatgctccagattcagtgaagtctccttatcagagcttcttatagcacccatacttttctttctcagcatttattatgaatgtaatcaaatcatactttgtgcatgttttgttgtggttgctgtttaatgactattttgtccatgaaagaaggaactgtgtttgttttatcactggtttatccaagggactagaacaatgtatggcacatacaggatttaacgaattttttttaatgattaatgcccctttagatagtgtttttcatctgagtgcctcaacttctatgtgcattatgaaactgatatagtgggtcacaactatcagtaagaaaaaaagaactggaatagagtagaaaaagatgagaatgtatcacgcatagggaataacttttataaatctgtttcagtatggataggcaggcctacaccacacacacacacacacacacacacacacacacacacacacacacacattgagttcctatgaatttgttttttttaatttctttcttttttttttttgagaaggaatctcactctgtcacccaggctggagtgcagtggtgcgatctccactcactactgcaacctctgcctccctggttcaagtgattctcctgcctcagactcccgagtagctgagattacaggcacctgccaccatgcctggctaattttttgtcgttgttgtatttttagtagagatggggttttgccatgttggccaggctggtctagaactcctgacctcaagtgatcggcccgccttggcctctcaaaatgctgggactacgggcgtgagccaccgcacctggccaatattttttaaggtaagaattttgagaaacactgtcctaggttccctctaaaaccgaagatatcaccctatgttcagccttttagccctaatccttttcttaatcttccctatgaccaaatattaccatgcacacatgcacacacatacacacatgtgtgcacatacacatgtacactaatccatctaaagtgctactgttaaggaggagcaatagaagaggtgattcagggaatggtttttgatggttatttacttttataatagtttttatttgtaaaaagaagaaacctagagttttgtatcctaaacaaaatttaggattaggatacaaaataataaaattcaaaataagtcttgactagtgagtgtagaaggacagtgctacatctgaatctccagttgggtttacgcattttgtatttatcaaaaggcagtagtgatttaaaatgttgataaacactcagtttcagttttctattgctgcaaacaaactattccagaaagtgatgtcttgaaacacaaccattctattttgcagtctgtgctgggctcagccgggcagtcctgctggtcttacccatggtccccaatatggctgcagtcactccagtagactggaggctgggcttagctgagatgacctgctttctttctttcttcatgtagtctcatggcttttctctctctccatgtggattcctcatgtgaactctccagcaaggtagtcagaatttcttccctggcaactcagggctgccaagaacacaaaagccaggctttcttaatgtttaagcccagaactggcatgtggccaattttttgtgttctgttggttaaagcaaaccgagtcaagaagagcctacacaagtagtaatattacaagtatgatgaaatatcattctcttcttagaccaaacagcatattcctccctccactcttaccctctataatgttttgcttttgggagttcctttatatgaaatgcctcccctctacttctccttctactgaaatcctactcatcctgaatccagctcagagctaactcagtgatttccttcatacatctctattatctcatcctggaaataatcactcctgccaggtgcagtggctcatgcctgtaatcccagcactttgggaggctgagacaggcagatcactgaaggttgggagttcgagaccagcctggccaacatgatgaaaccccgtctctactaaaaatgcaaaaattagccagacatggtggtgaatgcctgtaatcttagttacttggcaggctgaggcaggagaatcacttgcacctgggaggcggatgttgcgagccaagatcgtgccactgcactccagcctggatgacagagcaagactccagctcaaacaaaaaaaagaaaaaagaaaaagaaaaatgccctcagcactctcatagcattatgtctatatttcatattatgtcttgacatataactttacacacacacacaagcacacacacacacagatgtagcttgcttttagattttaagttgcttatctaagattgggtgatcaataactgtttttttcaaaaaacattaactggttttctatgacttttaaatgacagctctaaataattataatttctcactagtttaaaaaggcaggtggtgggatattcaaaactattggagaaaaaaagctgatgtatgctaccagcataaaacaacaattgccctttacatcttcagaaacccctgtactgtgcagtcattttcaaacctggatttttgtcttgtgttttttccaaagtagtatatatttaactttgtaaaatggtgtggtgttttttggttgttgttgtttttgagatggagtttcattcttgtaccccaggctggagtgcaatggcgcgatctcagctcaccgcaaactccgcctcccgggttcaagcgattctccttcctcagcctcctgagtagctgggattacagtcatgcgccaccacgcccggctgattttgcatttttagcagaggcagggtttcaccatgttggtcaggctggtcttgaactcctgacctcatgatccaactgcctcggcctcccaaagtgctgggattacaagcatgagtcaccacgcccggcctaacatggtggtttttttcctacctaatatgaagatacttaatgtcttaccttggaaaaatatacatttcaaccagtttatattttacagaagtgactgagaaatcataagcctttgtgcaataacatcatcagtcaaacacataagcagattctaatctgccctctctatcaattagtcttaaaactacaagttgttcctctataccagctacacatgtgcattggtagtcttaaattgtgatatgagcccttaggtagttcacacctttccaaaggaagctcagtgaacttcctgaaactgtgtaaagaattgtgtgtgcagtatgtgcatgtacattatctgtatttttctgggtggatgatccagtatcctcatcagagtcttaagtttgagaaacccaattatatattagttgtaaatctgtttactttcttagaattcttctcacattaaaactaagattatatttctatttcataggtaaccaatttcttctggagcaactggacacttacacgaacacttccatctgtctttcatctttacattttatttctaggtattactagtgttaggtcacactccctcctatggggagattctctatcacatctctagaacttcaccaatgcaagccttcttaaattgacccactcgctactgagtctgacccctgggccagtcacatcggtgcttgttagaaatcagaatcttggaactaaatcagaatctgcaatttaacaagatttctaggagtttccacagcatatttaaagcttaagaagcacaaagctggtgcatctaataccccactttctgctttttaatcttgcaggatttatgttttaaattctttataatactattaacaattatcatttgatttctattttcatatcatctgacagttttgattaaatcctttaacctcaggatttgtaaggggtaaggggagtgggttaactaactgatctgattatcaaataatgctaccattcaggacttatgcatagtttctgtgattctcaatagaatttgatggtacctacaacctctactccttgttttagtgtctatgtttttccactgtgcttaaaaacatttaaagggagaggctggaaaattattttaagatgaatactataaatgaaataactaagattagaaaaggcaatgataatactgaattacattggaaaaattcagtttacaaaactctgaaaagttcctaaggcagaattttgctgccccggtttctcataatagacccagcagttctaagttaagcacacatctttttggctatatggtgtatataccagactatcctttttctccaaaatttgactttcatctcaaagagtttaaggaatttgtgacttggtgcgtttgatgtggcacagttccacatgtgagggatggtgatttggatagcacgacagaagtacgtgccaagaataattggcttctgtcttgcggaacagctcaaatactatgtgtatcacagtatgtaatttgggtgtacaaaatgcctgtagttcaaagtgctttactcctctgcagtggcaagctgagcttcctgttggctgattccttatgtttgcagtaaacaggctgggtgcagttagaaagaaagcatccatctagtaagtgcattcacatcatccttcaaatgccataggccttagctccaggacattttctgcctgtctccttccctccctcctttctttcttttcctctctccttccctctttcctttgttccttctttcctccctccccttccctccttttcttcctagttccccctttctttcctttcttctattgaataaaacgcaaagtaattctttttctacttactttgattcttatcagctttcttaagcagtttccttgccgctgttgtgaattacatggggctgtggtaaaatgtggcacatttcaaggctatgtatccctttagattctggttcagtaagcttggaaataaataggagagcttacgcttttaactactagcctgcgattcgtataatcatgttagtttgagaaacactacagtaatcacacatgtaagggctttggagtaagatggaccttggttatccaacgcttactgtgtgactttggtaaattacctaaacttttctagccttggattttaatgtgtaaaagatagataatactaactcagtaattctttatgggttccatgagacaatgtatttaaagcacccagcatactatctggttcatagtttacagtcaataaatgttaattccattatttgatcacaatgtaagactattgaggtttaattttgattgttttttcaaaagtttgtaatctgttaggaacaatttctaaagtaaaattcagaaaacaaaaccatcaaaatttaattcagctaacatttttgaggttctatatagtctcgaacatatattatctaattcgattatcactataaaccctgtgtatagtagatattatcattcccattagtggatatgcaaaccacggctgtgggatagttttacatttagtaagtggcagatccaagtctagacagcccaggctggttctctttatactctgcctggcaacatttgccttcatcactgtctgttttcaaaagtaactaacctctacatccctgctcacacatacaaatagctctaaaggtacaaaataaagctaattttctgagcaattcattttattcaaatcagtctaatgatctgttccatgaaaaatgattatgtagctcaaaggtcttcaaactcgtctcaaaccaggggtcaggcagatcatattcacataaagggagaagcttgccagccagaagtcaataaagattcctgggactggggtgacctggaagctacaacctgtttaaaggagacagcttctgcctagctccaggctagtgctcaagtgccaggatgtgggctccctattgtcaaatcttttttttttttgcttttttaagactggaagaaatccaatatttaatgcgaaacttcccatttttgaacaacgtgtgtgggccaaacaagtcacatctgtggaccagatctggcctgaggattgccagtttgcaatcttgacctaattgcccttaattcttcacttctcttgacctggtaaatactccatttaaatgagtattaggtatgttctgggcccttttggactgggtctttgtaatatatacaaatttcaaagactgacctttagtttttcaggttcagaattgattttctcagaacccaattagatcaggtgctgtcactgacactcagaactcatgaactttatgcaagagcaagaacatgaattagggaattcacagtgagaaatatattgacaagtagacaggataccatattggccagatcagttcattctgtccttgtagttcagccccttgagaaacaaacttctaattagaagctgctttgacatatatggagtcagaaactaggaactgtagactttaaagggctttcctgcattgggttttgagattcttcctccttttatggtagtcttaacattcggctgttaagtgttatgctccccctccccaggcatgccaagtatatactgaccaagtgtcttctttatttagctaccatatgagtggttctcaaacccatgcccttgttaaaacacagattacagagccctatgccccacaaattctgattcagtacttctggggtgggtcctgagaattttccttcttataagttcccaagtgatgctgatgctgatgaactgctggatggggaaccccctttgagaagcactgggttcctctatcatcttcagctgacaggctttttcccctttgaagggttaccgctattgtctgtgtctctgctttaatatgctaatatagcattatggtcatatccagatcctgaggttggaacctgggtcttagaacaatttttaaattgtttatatttttaaaggtatttgatttattaaaactatttgattactttatttcatcaagtccaaggtgccattgattataaaaacatgtctggattttagaggcattaaaaatgtaggggccaggcgcgatggctcatgcctgtaaccccagcactttgggaggccgaggcgtgcagatcacctgaggtcgggagtttgagaccagcctgaccaacatggagaaaccccatctctactaaaaataaaaaattagccaggagtagtggcacatgcctgtaatcccagctacttgggaggctgaggcaggagaatcgcttgaacccaagaggcggaggttgtggtaagccgagatcataccattgcactccagcctgggcaacaagagcaaaagtctgtctcaaaaaaaaaaaaaaaaaaaaaaagtagggaaaaaattaacagtttcagaggtactgcaaattagtaaataaagcctcagtttggggcagtctcccctggattatgttgtatgtgtgtagctcaactcgatgggcacagttgaaggaaggattccctggtatgtttgttaaacaaacataaggtgaattttaagcctcccttccccaattcttagtggaaaagacactactggtactgtgtcctatggctgactttgtcgtctaattgaaatatcttattattgtatgcatcctctcctacttaaatgtgaccctgaaatgccagatctttcctttggaatgaatcttttttgtcttattggactggtagggctatgcacttaaaaaaaaaaaaaagttgattattagactcactgtttccttggccagtcaggaaaagatatttaggacaagagtttctcaattgtcctcatccagttttgcctttatagtgaatttcaataaatattaccatgcctatgtaagagggtgactggagaggcagaaattctatctgactgtccacttctaactctactattggaaaacctgctaggggtttttgtatttattatttttggaaaaatcattaagtggattcccttagctatataaacataaggcctgtcatctttttctttggagaaagagtgtgacaaaatttcccccttcttattaaaagctacccctcctcttggtacagtttgaggatagcgtggaccaaactacctaagaattcaggagtctaccaggagaaaagagactttctcactttgtcccacaattagaagtactgaggaaacccatgagaatggatgaaaaagggcagtcccatggtgtattgtcgggagagaatgctgatacggcgggccctagagggattaatgtatctgtgtagaggaaggggaaacctaagctgcctgctcaagaagagcatcttagattgttgagtgagggctgatctttactaaatgagttaaatcaaagagccgaactcttggagtccaaggctgggcatggagacccaaaccagcaaggacacaggtctggacaggaccattgttcactgtgataccacatggcagtggcagaagccttcataccaattgccgtcctctctacacctgaagtttagaagcacgactctgctttagactgaataatccctgaggttcttgggttatttgaaagaggggtagttttcaaaaagagagatattagatttcctattgaaagggcagccctggtctccagtgattaactggaaaaacaaaagagatataacaatttttacatctaagtactgtgctagcttctgtggatctagaatcaaatgagacaagatgtagtatgacaagcagttagactctcaagaaaatcattcaagtctgtttaggaaaactgacattcattcattcagcaaactattgagtagctcctgtgcatcagaacctgtattcacagtcaactgaaataaacacaatttctacacgagtggagttttccaaatagactaagatgtcataatggactgtgtgtagagtaatgttcaagttttttttgtttaagcttccccatcccccagaaaatactggatatatatagcaaaacctttcatggataataattgacatataccttggaggccatttggaatctccataaacgaaagaagaaagggcatttcagacaaagggaactacatgtacaaagtcacaggcatgtagaaaaagatgaatgtttcggagtaacttacagtatgtagggcgcaaacagaggaaacggcaaggaataagactatgtgagaaagcaagttagggcgaccttattaaaaagtttatagacagtggcgcaccgccaaagatgtagaaatgtggcttgctgtgttctgtattttggagcaatcactcgggtaccctgtgttgtgagtaggggtgaaagaagagaatcagtggaaccatgggaagcagtttgggagataggttggaaaaatattggaatgttctaagcatgacattgtgaaagaatgctagaatctttttcatatgaggggtgttatggaaaataaagaaagtattggccctgccctcaagaagcttggaacataaaagaagtaaaacatgagagcagggcctaataatgtatctcaaagtgctgaaggaagcatatgcattatagaagttctcatcctggactgtggtttgttgagaatgcagctgggtggagtctgaggaagtaagtgatggccataatcgaagaagagataagaggtaagagcaatggcttaaaagcaaaaaagcctcaaaacattcaaacttcctttgtataatagtggatgttattttgagaatgtcagtttcaggagataccataatcatgtgtttgtctgtatttaaaaagccaccaccataaaagatctagagtcactcatgaagttcaagtaccaatttttacccatgagtgtggaacattctgctcttttacaaacagtaactcgtactgtcacattttgcggcgcatctctcattttgttggttatttagtggccatgtaaacatgtacatgacttgtggtgaatatggtgattctcactttataaccaaagagggtggatgttacagcatatgagcagttatgactgtaaagcctgaagtgtgagtcacagggtctgacccaggtagtaagatgtgttatttgttcatgttggttagctgaatttcctgggctgacctcactgaagtttgctccagtaaagaaccggatctttactgatagatcaaggatctgaattctgcacctagttctttggctaaccagttgtgtcctttgggggaaatttcttaatctttctgctctccatttccctttctgtaagtaagggattagaccaaattccatccaggattgagaaattctatggtgtgacaaagactgctggtgctgactgaatatccttacagatttgttcatttagtaaccaatataataaagatgactgactgaatcttaattatattgggtgacatctgcctagtcaaaagattgcatttctcaggctttctaagagattgatgcagccaactacatgttagcagagggagctcctgcctagaagcactcacttttactcctcctcccgtttgtgtagtagtgatttggtgctggtgctggctggagcatcagtagccatcttgtaacctaaatggcagaattgagaatggaagccatgtgttacggatggtggatcagaaagataataggaacctaggtccctgataaacatggtgtcaccattccaaccttgacctgtttctagattattttctttacttttctttttcctttcctcttttttttttttttttttttttgagtctttctctgtcacccaggctggagtgtagtggtgtgatcagggcttactgcagccttagcctcctgcactcaagcaattctcccacttcagcctcacgagtagctggaaccacaggtgcatgccaccatacccagcaatttttttttttttaattttttgtagagatgaggtctcactatgttacccaggctggtctcaaactcatgtactcaagtgatcctcttgccttggcttcccaaagtgctgggattaaaggcatgagccaacatgcccaggctacattttcttaatatgagataaaaataaacctctttcttattgaagccattactagatgcctaattcactttctaactaacatattagcatcagattatctttatgtaatttccattgctaggttttctctttgcagtattggagacaatagcttaccaactagcttgggaacttcttagtgctattagagtttcaacacaatttaccaaatttctaaaattatttagttattggatatatgaaaacataatcaccatatgtgaagaaaaaaccaccaatgtttagtacaaaaattgggagggggaatattatattagagaaagtttattaatccagaaaaccacagaatttaaaaaatattggaagttgggaatttgggagttaaaggtacatttgatctttggttaatggcaagttcacattttataataggatgtaaaaccctatttctcactgcacctgtactttgatcttcttgtctgtcattgcaatgtgattatgaggattactgggtcactctcagcctaagatgtttttgtgacttaattttctaggagaggaaggggatcattaaaggatatcattaaaaggagagacacaaggcttgtaattgaccttccttgaaagtagtcccatctggaagattttatcagtaaacatttatcagtgtatttggcttttaagcagactcttctcctcttgtctttgaaacaaacaggcaaaggctaaaaaggaacacgttagtgctcaaagtttgcttcttgtgcatgctgaatgggaagaaaaataatatttaagaaaaaagctttcttctaagttaattacatgattcttttttcagttttgcttcaatgtttctgtttgccaaattttaattggcaagttatggtgttcttcaatgattatgccttggtgtgatttgcttggatgtgtgtttagagagtggagggtagaagggatgagatttttgtgaaatacagtgagcaggggcttagaaaacctactgcagttctctgtgtgactaagcccagcactagtctgaaacttcgtattgtacttctctggaatgcaataactatcgtcaggaagacaaacgttgctgtggcttaaataaaataaactgacatgatgtattaccagtcaaaataaattacccaaacagtcttgtaaagttgtgttttttggtcatcagaactgcctcattattcatgtgtctgtttgtctctttggttagttttgcttgttgacttgcatgtatcaatgatcacaatccttgtcatttgccaattccatataaactttcagaaagtgaaaattgcttttaagaaatttattttgaagtttctacttatatttacccacataatgcccctcactgatagccagctttgtttcttccattcctttgagaatactccctagtgaatttaaagagtaaaatctgatgttgtggattataatattatacaccaataagtggttgttacacacttgtgtccacacttggtaagatgtccttgtggatgtatctcttctatgtatagtatattaatggctttatccgccatttaatgtggttcccatgaggtttaggtagaccatagatactgtttcaattagaacacttcatgaggatttagtttctctgtctatgggtcctgtatctgaactctccatttttattcttttgtttgttttttgttttgttttctccctgatgcctgatatcagaagaactctccatttttggcttcattctctgctctatccacatgagacagaccaatgtctgcaatctagtgccatacctttccaggttttttatgtccaacaaaaaaagagagcatctctttctagtagctcccacataattaagggtatagcccctctcctgaaccaatcagtcaatcacagtggtcccatctgaccatggggatgttccccaaaggaaatcagggtgttatttttcaaaaggaagaagaaataaatgctggaccttcataacaaccaattgcccactaaaagtgcagtcatatttcttgatgaaatagaacctctccttgtatactgggctccatgacacattgatcatggttagctagaagattctgaagtcttattatccactttgccagttacatttatttgtagctcaaggggactgttaagggaaaggggagcagtgctaaaaacaaatcccattccaatattattaaaaaaaccattgctctgcccttcctttattcacaacttagttcctcatcctcatcttccccagctcctccttttcagctatttcctctgtaggtgcccctaccactaactcccacagattcccccatctcctttgaagaaaaaagctagatgctcccactccctttatttcttccacagtaaccagcttaactagcacacggctttgtacatggtacacagttaagtaatatttgtgaaataaatacggaacacttaagggaaataaaaagcaatctatcctcatcaagaatgagctgagaatccctgagatagcctatttagcagcttagcctgaattctgttttagtttctgtttctggaaactcttcttattttaagaaagaatgattcttataattatttcatatttgttgatattatccagtcttagccagttatcaaaatggtcttgagaattaggaggggaaagcataatgttataaacatttcagcatattgtgcaagtaaagtcctggtagtctgggtaattctagaactcgagtagacttgaagtgatatcagaggaaagctattacccaagtttactgcttgctaatcaggcagccagcaataatgagatggtacaatagaaatgttcaaagtaaggtttcttggcatacatagctatttaattattttatttctgaaagaactatagctccactgttacctaagtttaacctttaggcatttaatataatagtatctctagtgtaacagagggaatcaattactatgataaaccatatcctttgtaaaagaatactataataccaagaaaggcttttgtcttcatctttttagtttttggttattttttgttccattccctttaggtaagaataagcatctagaatgcctcattatgagattgttaatgaatattttccattgtaatttaataagcctaaaaataagaagatactcctctactttgtcatacaagatcgttgaatggtgggtcattagttgatagcaaaaagtcactcattcttagttatgtttctgatgacttgaaaaattgagtggcagtatacaaagtctgagcaaaactgacttcagaatgagtatttggctttgatttctcatggcatcttgcccattgagccatcttttcagaggtctcagctgtatgaaaaaatagtacttttttttttccagaaacatgaagtctggcaatctttataactttgtgcagcttgttgattcccggattcaatggtgttagtgaaaaagaagtctcaggagctccagagtctcagaagaatgacaagaagacccctaattcttgcctgtctctatatttagtatccaagttggggataaaagctagtttttaagattttctgttcagaaatcttttctatatactattcagaggcagccctttgtttaaacctttttttgtctcaggcatggattaactgcaattggattctatgttaaaaatgtatttttttgaacattttgtaggcatcactccagtattttctattggtgaaatcctgatctttttctgtgtagaaatttttgtgaccttcttttctttactgaagttcccacatttcatgatcaattgtcttggtctgcatttttatccattgccctgggcacgcaatagaccttttcactccagagatatgagtccttcagttctgaaatgtttgctcttattcattgataattttatgccctctattttctctgttctttcttccttgaattctcattatcttagttggatctcctagatcatatcctttaatttcttaattgttttcttccttttttgtctttttgttttttggtcttctagaagatttgttcacacacatttttattttccaaccttactattaaaatgtttattttggtcatgatttaaaaataatttagcactctcattctctcctttttttttttttttttttttttttttttgagacggagtcttgctctgtcaccaggctggagtgcagtggcataatcttggctcactgcaacctctgcctcccaggttcaagcaattctcctgcctcagcctcccgagtaactgggactacaggagcatgccaccacacccagctaatttttgtatttttagtagagatggggtttcaccatgttggccagggtgatctcgatctcttgacctcatgatccgcccacctcagcctcccaaagtgctgggattacaggcatgagccaacatgcccagcctcatcctctcctttttaatggtatatgttcttatgtcagaagtgtgttttatctaaggtcacagattattatcctcttgaggttttcctctgtctctctctttcctgtagatttctttcttcagttgatgtttgcttcttctagtttctcttcttcattatggagagtttccttaagaggctgttcattcttagttaaaagcaagacatatacaggtgcatatgcacacacacacaaaacaaagcaacaatgacaatgatggcaagaaacaatgtcagaagttctgtgatcatggatagggctcgtcaactgtagggttgcactgttgcatcataggttgttcaatcaaagccggtgtgttctttgaaatgtttccccaaggtcatgattagggggtaccccactttctgcctgcgagatttgcgcctggggcatataactgactgctaatgtctggggagcatgacaaataaaaaagttgggtttcttattgcaaactctataggctttcaaataagcacctatttcgcaacctgcagcctctcctagtttgctacagtgcctagtatcatcagtttcaaatctctctagccgatttcctccaaaaaagaaagactccgcttccagtaggtaagggaagtagttagtttggatccaaaggctccatataattttaatacactttcagcccctcgctaaactcctgccttccttaattctgctgcctccaagcagtaagtctttctggattcgggagaacacattagtccactttctcttggaatttactctccgtaaccatttcctcgattatgctaaggcacttcagctattttctgatttcaaaaaatcagtagaaatctctcctttgctgatcttgtttcctttattatttgtgcctttgtgggtgggtgtgttgtgtttttattcctttactttcacttcagtgaagtatcagtaaaagagaaagaagataagcaggcatgatttcaccctctcttactggaaatccaggggaacgatagctgaggaggaaagtagcttggaagagcaccttagagtagaaaaagacgggagaaggtgagtttacaaaagtacagcaagatgatgatgatgataaataaaactcaatgcgtgctcactatgtatttgcactgtgcaaagttctttacatggattatttatttgtgtttttgtaagaacacctcaggaagtagctattgagacacagagaagtaatatgacttgtttaggttagtaaatggtagaggtggtattcaaattcagatctgatttcagagaccatcctctcaactgccacactatcttgcctcctacaaattgcttaagcagggatttaaaatgaaaccgtacttttacaaaaatcatttttcatgtccattatttaggagtctctctactctatcaaaagtattaattgacctatttattaatatcttagtaatgtaaaatgcttttaggtttgcaaattagtaagagaaacttcttcagattaatagatgctgtctttatgaggactgcatgagacttatgtactcatcattatatacacccacagacgatctatttgaattctgtactcttactcttttgttaaataaatgtactctttctaactatgttttaaatcatctgcaaagagatggaagctgtgtgtatacaacagcaaacatctggaagaaaagaatattcagccaaagcttgttaaagagattcataagcaaagtatgcctttgaattatgaaaatgaattcatgtccaacatcataaagaactctgacatgtctgtttatgtttcaaacatggcttagagatcactgagattaaaattcaattaagtgtgctctgttgtctttgctgtcaatttcagttaaaccagacttgtttggcagttttggggagaaaaatcttcagtgttttaccttgctaacattttaccatttggactttgtgttttttcccartcaaatgcatgtcatttaaggagatgcttcatgttatacacacctggtgattttcatcagcagttgtacagatgaaagagaagtaaaagcccccaaataattcatcttttaggctttgtaaaattatcattttataaatttttaaattgtgaaatataacaaaatttaagaaagtatgtaaaatttaaattttaagtttaacaaattgttctaaagtaaatacctactatgatcacccctcagaaagaccctataatttcctgtttcatcctctccagataggtcaccactatcttgactttacttttacttttcctacttttctttatgatttaccacgtatgtatgcatgccaaaacaacagttcaatttagtttgttttgcattttatgtaaatggactcatcttgtagatactcctgtgttttgctccttttgtgcaatattatagttgtaaaattcatcaatgttgtatgtagctgaggattgcacatcataatatatatcatgatatatagcattctrttgtataaaggaaccacaatttactgtccaatcttctttctttatgcagttgaacatatccagtttggaaatattatgaataaagatatttcgaacacttatgtgcgtgtatcttgatgcacataagcgtacatttttgtgggggaatatacctaggagtggattcatgggtcatgcatatctttaacttcagcagataagcagaaagcatttgacaaagtggttgagaaggtaatgagaattcctgttgctccacgttctaataaaaaacacttggattttctttcttttttttcaaatgacagggctctataatgggatcattgcatttctctgattactaatgagagtgagtactccttcatatgtttagtagatatttgaattgtatttgtttttgttgttgttgtagctcttcatgaaaagtactttctaaacagcatttctgagcaccctttagggagccaaaggccaaataagttagagtatttgtcacaacatggcaataagagaggcgaattcatccattaattgcttgccatatgcttatcactggaatatattttgcagcatctcctgacatcactatttatcccttttaccaaaaaaaaaaaaaaaaaaaagaaaaagaaaaaaaaaacatggctactgataatacttgggagcactcaacgaaggtcccgtctgagactctgtagaatatattatagaatgcaaatattctttggattccgtcttgttgttgttgttgctgtttcctaccctacaacttttggcatctctacccaacatttttataatacaggactgtctctgaggtttgttttccttatggttgttctcatgtataaaagagatgatgatagcgtttctcatgccagtatgtctgtgtatgatttatgttgtaaacagtgcaaagagctttacagccattgtctcactaatcttcagagcatcttttcgaaatagagaggagacaagtgaatcaacatcctctatatcacgggaggaaacatatctccctgtggagagatgtccactgctttatcgacaaggcacaaagctgcgaacagaattcaggttgtattctgactcctacactaatgcctatggactagacatggtgtaaaattttatatgcgtgaaacatgaggtgtattcatcaactgatcactattagcmactggctagaacatgaagtgtttgtttgtttttcaaaagaaagatatgatgaaactttatatgcttttacacagttctgatattttaacaatttgactaatttttatagttttattccttccagaaattcctttaactgtgcttatcccgtaagtaattgctaatgttcttaaactaatcgagaaaatcatttctattagtccctaaatacccagacttcataccttcttgcttcccactctcctcatatctaatctctcccttaggtttagcaacaaaatgtgcagcttgacrtggtcagtgggtgtctgaacatttagtgctagtgtttcctctcatctctctgcttttatttggacttctcaactcttaaaagtaattttaacatattataagaaatctttgaatttataacactttacagtttatgaaagactatataaaggttccttctcacaggctgtaaggggtacaaggacaatgaaactcagatgacatccttaaatgcactctactattatatggctaatttaagattaaaaatctggtttcataattattagtctagtggtccttttataggcagcataatacagttgtaaggagtacagactgcctgtttttgaatcactggtccatgctaactagctggcttacccttgggcaagttacttgaggttctctgtgcctcagtttccccagctatcaaatagatctaagagttgtgaaaattcaatgagttgatacatataaaaatacttaaagcagtgcctgtccaacataaatgcttaataaatgttagccctattatctttcctcattatttagtgttaaagagcaagaacatctataaaaataaaaatcaaataatccttcaaaaattcctgaatattataaaactaacatataatgtcaactaaaattgataccaattagtttccttatcttgaatgaaatcagtattgtagtcagagccaagctactgacctggattcacatataacattcagtttctcttctgaaactccagctcacttagcacatttatgccaaaaacaacaacaacaacaacaacaaaaatgtataaattgcctcatttgtttgaagtgtaacactcaggttttccatacagcaggaaactctgatagaagtatagattaataggcaaggcattgctccattccctaaaggcgtaataaggctattccacaaatatgtattgaacttctacacaggtttaagaattatgaggaggagagaagatattgtaatgaatccctactattctgtttattttttatttctttttaactttttaagttcaggggtacatgtacagatttgttacataggtaaacttgtgtcatggggtttgtagtacagattatttcatcacccacatattacacctaatacccattagttgattttcctgatcctctcactcctcccaccctccacctctctgataggtcacagtgtctgttgtttccctctatgtgtccatgagttgtcatcatttagctcccacttacaagtgagaacatgcagttcctgtgttagtttgctaaggatattggcctccagctccatcagtgttcctggaaaggacactatctcattcttttttatggcttcatagtattccatggtgtttatgtaccacatttgctttatcctgtctactactgttgggcatttaggttgattctatgtctttgctattgttaatgctgctgtaatgaacatacacatgcatgtgtctttataatagaatgatttatattcctttgggcatatacccagaaatgagattgctgggttgaatgctagttctgtttttaggtctttgaggaattgccacactgtcttccacaatggttgaactaatttacactcccatcaacagtgtataagtgttcctctgagtacctgttattcctttgaagaaaatacctacacaactagataattagagaaggagagaaagagaaagagagagaaggatggcacaataataaagtgttttttggaggcaaggatgatgttttatgaatttttgtattcccagaaaataacagataagtggttattagtgaatgaagaaatgaatgagttaactaattgtagcagaaaagggaaagataaatataaataaaggtcatccatctatttaacaaacatgtattgcatgcctaggaattgtacttggcttgaagactttaaagtagattaagacagtcccagacttcaaggaccagcaactgagggtgttaaacagaaaggacaatgacattacaacaagctgtgggttcacacataccatttcaagactagagaagagaagaaaatcagagattcttccagaaatgaaaattcttgagctggggctttgaggatgaggagaagttagttagttagaaaggaaagatgagtaaggttgggggtcaatagttcgagcaaatattgcagtatgaaaggtgtgagagagcctcaaacaggttacagattgtggcactataggtgatggggaaggagtgagagaggtaactacagagaagtaacctattaggaactgctaagaaatgttagatattatgctaaaaagcttggaatattttttaaagcatgggggcatcacttgatgatctttctcaaggacaggactattaatcttagggtttattatattcttcaattttgacacaatttatacttcaataattctctgtaagaatttttttcctttgtggtcttatttatttattgagatagggtcttgctctgtcacccaggctggagagcagtggcaatcatggctcattgcagccttgacctcccaggctcaaacgatcctcctgcctcagcctcccaagtagctgggactataagcacgcaccactgtgcctggctaatttttaaaaatttttgtagagacaaggtctccctatgttttcttggctggtctcgaactcctggtctcaagcaatcatcccacctcrgcctcccaaagtgctgggatgacaggtgggagtcaccacatctggccttatttttttaacgtattttttaaaaacccaagaacaggcattttctgcgtaatgtgcctgcattttggctttgtatttactaatgcttgaattattgccttagctatacataatcaactgaagaaaagtatttaacttttagctacagtgatttctcatatggaaactgtatacttctcagggattgtggaaatgtccttggaagtctatgacccctcaaatttgagaaatgttgatgtggaggtagaattggagtaggcaggggaaagacaggtaccaggaaaaccagttcagagcctactacaataatcatatgagaaacaaagagggcttgaactaagggagttcagatgaaagaagaatctaatagttatttatagagtaaaatagacagaacttggtgacttccaggattttaggcttgagagagggaggactcaagaattgtacatgggtttctggtttcagtgattagatttctggcatctgctgtccataagatagtaaaaactgcagatagggtaaatgccagtattggaaatatgaagtttgaggtgtctgtgcacatccagatagaaatttatggaatgtggaagagcaatgtaagctggggttttcagcacaatggtaggtaggtattgtagttttgggggtgaaggtactcacacaggcaatgagtagactaaaaaaasaaaaatatagagaaagaagaatccaacaaagagattgagaagtagtggctgagaagtaggcagaaatttaggagagtggtgttctcaactccaaggtaggagagaattccaagattggaattgttagaaaaatttgatggagaaggtattctttgaactgtgtgtgaatagacaaagagctctgacagagcagaaaggaggaggtatggattctgggtgaggaaatgttataagcagtcccacaaagagtgacatcagatttatacaagaagccagagcttgactgtagtgggcagtacagcatagggtggaaagcatagactctgaaaccaactccttaggttcaaatctcagctctccacttttagctatgtgacccttggcaggttatgtaaccttctaaagcctcgattttctcctgtgtaaagtggaggcagtgatagtacattgttaatagattgtttactttttactcttctgtatagacggaccccttgcaaaagtcagggtgattttatatatacaacatcgttatcagctacctctgaatacttgattcttttccttctacaaccccaacctccatttgaaaagttctcattattctttttcttacctattctaaaagtatcactcagtccccacttcctccagggagcttttctgacgagtattcagctcttacttcttagacctccagtaacatctaatgtttgtcaagtacaattaagcacttgcttttacaaaactaattgtgggagattatttctaatggtttcatgttttttaatcttctatccccaagaaagattgtaaacttcttaaagtcaagatacatctccagggtatccgcacattttgccgtgcctgggacactcagtttatgcccattgtcctgatatagtttatatgaattcataatttatagtgtccacttttgactctctcaagagggtagttgtttgcatgataaattccatgaacaacctggatataataatacatactttttgaaattagtaacaaatatttattgagtggctatagcatatctattacaaaataataataagcaagggggagaaaacgaactgtcaataattatgccattgagagataatttttctgtctctgtgtgtgagagtgtgtatgtagagagagaaggagttttactaacaacaatgagattatactgaaggtaatattttataatctgcttttaaaatttcacagtatattgcatcatgaacacttttcttaccattaaatacaattctctatataacattttaatggcatttccttacatgaatatactacacttaagcaattttctattattaaatatttgaagctctccccagatttcacattataagcactattgtgatgaatatctttgtgtagagtctttatagcaaggctgggttgttttcttactatatatttctagaattagaattgtcaaactaaagaattgcccaatattttaaagatttatttttgctattattgtcatattgccctgcagaaagtttatatatacttcatcagcagtctctatttctacattatttccgttgctatattttatcattttaattgttctctttatttgatgaatcacatagtattttgttttaataagaattaatttagcttcaagaatattaaaatctgttttgtgtgtctaatggcaattatacatatttgctttttattattttattatttattcgtgggctgatttgttttttcttgttgattttatttttatttattttttaggagacaggtgtctcactttgttgcccaggctggtctcaaactcctggactcaagtgatctgactgcctctgcctctcgaagtgctgggattacaggtgtgagccaccacccctggcctcttattgattttagagtgttctttagagattaagaatattaacttttcatttatgtttgttttttacacttttttgccatttattcatttctatttttacttttacagatactctattttaataaatagaagtttaaatagtccctatgtagcctgtatgtttatattgtttatatagtctctatataaatatattttataaatccttagcaattcttttccaacaccaatattttcttctagtatttaatcattttacatcatatatttatatctctaataattatggaatttattttactttatttcagggctctgatgttcttttcctagattttctaaattgtcagaatcctaggtattacataatctattatttccttattggcttgaaatgccacttctactgtttatggttagttccttttttaatctttacatcctatttctagacaaaaagccccatgttataattattatggattttaagaaatacattttaatatctgggagaacatattccctcttaatcttattttttagaatttcctgggttattctcacatcgttgtgctaaattatacaaacaatctacttgtcaagtcccccccaaaaaaacccattaagattttgattgaaattgcattaagttgcttataagcagtttataagtactacagagctccttatgatatccctgccaactacttaagaaactcctagttcttaaattacaaatattcccagtcaagaaaggatcaccagacatttgaaaaaagacaaaaaaccaaaccaaacaaaaaaaccagtagcctaaacaaaaaggaactaataaataaacaggacaaatttattttcctgagacaatttatcttctgctttccagaagaaacagagacaatgaaaagtgtgggaaaaatttgtcaatattaaattttcagagatattcagggggagaatataaccattaagtatgatctgatttccataaatagcagaatactgaatatatatgtatatataaagattggataaaatgcaattcaagtaatattcattcttgaatattgaattaagcaaatatcttagaatatagagcaaaaagccaaggatataaaatatgatggaaaagtaaaaaagatatgaagaatgtggtagaagtggaggaatgggaaaggatgtgggaaaataacagaaaaaaaatccttgacctgaagagtaattcaagtcctcagattgaaaagtttcatccaacaccgaacaaggaaaaaaggatacatatctagatgtgtatacacatgctgatgaaaattttggaattctaagtataagaaattaatccttccagagaacaaaaaaaaaggatctttcaaaggtatcaaacttctcatcagcaagattagaagtgaatgcagactaggcaaggtttcaaagttctcaggaagaagaactagaacccaaaattgatagtcaaactatcaagtgttaagacaaactaaagatgtatttaaacatggaaggactcaagtttacaactttacctcctacagattcttcctaattaaaaggaagtattactcgaagatatattcaagcaaaacaaagcaacgggaatcctatacagaaaacctaggatacaaagagcattggaaccaacccagatgtttatgaaaataaatcccagtatgacaactgtgtagtagtaggcctagaaagcaggcagcctaagttagagtcatcagaaggttccaggaaaaatgctttcaagaagaaagtagacatcacatttcgaattgcataattaagagccttttaacattttagggcaaaagtaactgcatttaactcatagattaatctaagacttgatatctttataatattgactcttcccatgtaggaaactagatatattcttcaagtttttaaaaatgtccttcagtgatgttttgcaataatatttatacaagagttttacatttttcgttgtttatttatacatatttgatatgttttattactattatgaataggatcatttatctattttctaactggtatatagaaaaaaacctgttgtggatacatgctttataatgtttgacctttcttataaatcataatggtctaccttttttatacctttcagttgattctcctgaattttgagttacagaatttttatcttaaaatagaatgatttccttctctcttaaaaatatttgtacagcatatttggttttcttgtttggttgcttacgttagaattttctgagcaacattcagtaatagtggagacagcttctttttgtttctgatttcattgttaattatagatgtcgaagaaaagctattcattaccatgaaaaggaactattctattcttattgtactgagagtgctattttactatcaactctttaataagtgtgatatactactgtattaggccattctcatgctgctgtgaagaaataccctagactgggtaatttataaagaaaagaggtttaattgactcacagttctgcatggctggggagacctcaggaaacttataatcatggcagaatgcacctctttacagggcagcaggagagagtaagcaccagcagggaaaattccagaagcttatataaccatcagatcttgtgaaactcattcattatcatgagaacagcatgggggaaactgccctatgattcaattatcttcacccagtccctcccgcaacacatggggattatggggattacaattcaagatgagattttggttagggcatggccaaaccatataatctacattaaggacattgttaagtggcaggataaatggtgtgggctcaactttatactatagaggaccattatagcaatatcataaaagtaatactttgagagactaagccaataataggacaaatataaatttgaggaaaagatatacaaaaccatttagtaattcaagcatctagtgataattgtataaccatatggacaaaggtagagaaaaatacctatagaaagtttgaacttaagagataggtcaggtaacaaacccactttttttcttttttttttttacctgattacttcctggtcatgaggttcaaaatatttgatagcaaaatgatttaaagtccaaattaatattgaattgaatatacacattacagccaaaaccagacctatttttctgttgcttatcatatataattatagaaagcataactgaacaacaggaagttattacttcttaaatatcagaaaacatttgactttctcttctgaaataaggaacggcagtaaccgaattctagttactgctcttaatagttttgtagttctcataaaatattgcttatatattatttggctcccacactatccattttgatggttttaaatttttcaaataaaaataaatgagttttcatactatggatgacttgacatcagttaaaagtgtaaattcatacttgaagatagcaggactctatgctctttcctcattgttctggtcaaatacatttccaatcatgataatcaataatgtgactattaatttttacttgaagttaatctattcatgtttgattagaagtgtctaaaacataaacttgggatgtcaatgaagaactttttaaaattctcctccacaatggctgataatcaggccatgattatattttgaagattttacctagttagtcatatttggggtaagaatatatgctatctccttcatattaatagttcagatctttaattataacatgtttcatggtctataagattaaattgaacattaggaaagcttagcatttctcatttgtgagtcttacattcacacctgtcaggattggtacagattcaagcttgtttttaataaacttcaaagaagatcaaaactagggatcatctgtttcatgtctttgacgtgatagaagtttggggcccccgttttgccctgtagcttttgcctaaggagaaagccacccttttcagctgatacttgctcccacaggtttttcacagtttttgagtagcgagtggcaagaagcaatatgacgatgttggtaggtagagagatacttcttcaccatctggtgagcattctggagaacagagacaagtcccacactgttaaaggagtgaagtcattttgcagccagttttaaggattgatttaagaactctaggagcaggccattatgtagtcatccattcagcacgattcttcgtgggactgtttacactagaaggaactgtagtgatcaatttagcgttgaggaaactgagggctacagagtgccagggtcacgttcatcacacttatttgtgtttcaaagcagaatccacactccaaaatgtgcaactactgtcttactatggaatttacactgacacattctgaggtcatgcaggaaatagaccagagtaaagcattagcaattaggtcagtagcttgagataatgcaggctctgaggcaatcttcactttcactgaccacagactgggattgggaacatgggaaacgtgtgtgtgtacagacacagcaacccttttctatgtgtcatgtcttcagctgagttttaagttgtactagtggaagccatagcctatgttggctcataggtcctagtgccctttccccttcccttgcctctgcccctgcccctttccttgccttgcccctgcccctgcccattccccttctcctctcctctcctctcctctcctctcctctcccctcctctcccctcctttcctttcctttccttgacactgggtagagtgtaatgcaatcatagcttactgcagccttgaacttccagggctcaaccagtcctcctgcctcagcctctgggtagcaaggacaataggcacacaccattatgcccagcttattattattattattattattattaattttgtagagatgggtcctgctatgttgcccaggctggtctcaaactcctggcctcaagcaattctctggcctcagtcatgcaaagtgtagggattacaggcatgagccatctcttccagctctagtgctatctctttataggaatcaaaaatttgttttggctatttcaaattttgtagagtaagaggtcaattagaaaagactcagttatgttttcaaaaatgcactgtgtgcatatgtgtgtagaaatgtattagaatgaaataacatttttttacagtggctaccattggtttgtgaaattatgcatgctttttcttaattttctctaatttttctctatttcctaagatttctaccatgagatttttctcttaatgtctagttttattacataggtaatagataaatatattcatgtcataaaatatttttaaaattcagaatatgagaaagtcctttttcatgctccttagtcttgctgtctttcttgaaagtatccacttagtgatggatacaatatggtgtatatctgccttaatccattttgtgctgctctaacagaatacttgagactaggtaatttatcatgagctgaaatttattggctcacagttctggaggctgggaaatctaaaatcaaggtgctggcatctgttaagggtccttttgttgcatcaccacatggcagaaagcaaaagggagagagatagacagattgggagagagagaggaaaggggaccaaacgtctcactcttttataacaaacctgctccagtgataacaggattaacccttacatcagggcaaagctcacatgacctaacacctcttagaagtcccaactcttgctggatgtggtggctcacacctgtaatctcagcactttgggaggctgaggtgggtggatcacttgaggtaaggagttcgagaccaacctgcctgagcaacatgaagaaaccctatcaatacaaaaaaatacaacaaaatagctgggcatggtggcatgtgcctgtagttccagctactctggaagctgaggtgggagaatcacctgagcttgggaagctgaggccacagtgagctatgatcatgccactgcactctaacctgggtgttgaagtgagaccctgtcaccaaaaaaaaaaaaaaaagagtcctacctcttaatactgttacaatggcaattaaacttcagcctgagttttggatggaacaaacattcaaaccatagcagtatcttttcagaatttttaactgaatatttatatatatgaacatttagaattaggggtaatttttaaaaatcaaaagtgatatactacagatgttattytgtgattgatctttgcacttactatgttttggagattattttattttagtacgtataaatctataccagttttcttaaattgcagcatagtatgtatatcaagtttatcctttaactattttcttactgatggccttttttaatattgcaaaccatactacactaaacattgtcgtgcatacttccttgtgtattacattggtttttaaatcaatgaactagttgtaaacatggagagaaacaacaaggagggagatggatataagagaagaagagattaaaggggatggaatcagttgtttctggagcacagaatattcaccaaatttgaccagatgcgcggttgctcatttaggaaagagcaactgcactgggatgaagaggttttttaggaaatcagaggtcttcagagaagttttggttaaaatctgcagtatacactaccaaaatggtttttgtctttgttgttcttatgcaagaaagactagctctttttatctagagctggaaggttgctgtcttggagtgggggagaaaggagacaagtatctgatgggtgggaatggaaggtgtgtatccttgcagcagacctccagagtagctgactgactgatatgcatggtagtcctaagatgtgtttgagaaaagaaaatattaggagctcttgacaaatcttgaaaatcaatacaaaaattagccaggcgtggtggcgtgtgcctgcagtcccagctactcagggggctgatgcagagaatccctagaacctgagaggcagaggttgcagcgagatcgcaccactgcactccagtctgggcaacagagtgagactctgtctcaaaaaaaaaaaaaaaagaagaaaaaaaaaatcagttgcccatcctgcagatatacagtatagtgtaactgcttcagccgcttgcaaatctcttttacaattcaaaacaaattatggagaaataagagtgaaatattttcctggaaaaataatgtgaaaaattgaagttttaaatatcatagttaaattgaatgtaccttagggacaactcctttatttaaaactccaattctccaataacacacctaatatttgttattttgttgttaaatatttactctatgtagacattatgctaagagtataatgcctttttaatattcagaagagcactctaaaagctattacagctttacagacaagaaacttgagaccagagagaggttaagtaacttgaccaattgtcatatagcatttaagtggcagagttaggatttgaacccaagtttttatgtatttaaaattctggctattaacaccacactgcaaagaaacttatttagtagataacaagttatatccatatatttttagatatcaatatatatgttgtggatcggtagcttggggcacattactgctttgaattgtggtatcttttattagatattgaaatactggattattgataagaccatgtagcagtgagaaaaatagtttttgctttgatttgtgtcagttatactatgttgttggagcttttgaagtagggagtgatcaggtagagacaggcagaagagattagtttgtatgtgttatcctgaaatctgagttatttgacatttttaaggcaaggcattgattgagttttatgaagataaattggcaaagaaaagtaatcccatctgctcaataacaattctttgcttttagccaagaaaattgatttcaacttgagagtaataatcatatttatcacacttgttaattgcatgaactgtatacaaattgtcaggcttattaaggtagatatttacggtcactgggcgttcctcacattccacattttcattgttatggcattaactattttttctgtttctctctttgtcactgaagacttcacgtagtataatagccagtattttctgtgattatatagcaatattctcaaacctaattgttcatacaaagtacaaatcagggactttttctactaggttctgaagtacttgttctctagatttaaactccagtgttgtactaatgggagtaagtttttcttttatctgccaaggagctcctcttacatgtaaaaaactgttgtttttcctctttgtaaatatcagtgtaaagtacacactgtataaaatgtaaattactgatgtgagagtggccattttattcacattgttcaatgccaaagtgggccaaaggattctggctcattaactttaaggaaactatagtattcttttgtctctttagccttccttctggtttattcaaagaattctcatcaggttgatcaagagttgaaaagtaaagcactgttcttaaaaactgctctctagaaagatctgcaatggttttgaggactgccaagcaacaggaggtagaaaaatggataactaaataacctcatttacagaaaatatgttaggttaaattgcataggaaaagatagtatgggtctttaaaaaaaatggatatttataacaaagaaaggataaaattaataagtaagttataaggaatatttagaaaaataaaaacagtattctaaaagacaatacttatatctttctaatgtaaatcttagaaaatggtgagaatttcttgtatgctttatatttataagaagtaataatagcttttgaaataattccatattataagaagtcttttcttcatatgtacccaattccaaataagtggatgctggaagaaaatctgtaatttattttatttaaaagaaatgcagtatattaataaatacctattttttggataataaaataagcaacattttccagaatgaggtttttttttgcaacaaatgtgcataccaatgatttgaagtatttaaaagaaacttttctacttgaaaggaaccaagatgactaagtactaattttgcggaatctccaattgggaggatatctactgctcagaaaagcaaactaaaacaagacaagaaattaaaattgacaaaggagaagttccatataatctaattcaaaatcaaatgagtttttcaaagaaataagtttcatcatgtaatctaagccaaaatgagctgaaaatttacacacaatttcttttctttttctttttctctatttcccattaggtggtttccatccatggaaactagttacatggcattcctaccatcccatgcccatggtagacataattaagaaattgtgtgtgtgtgtgtgtgtgtgtgtgtgtgtgtgtgtgtgtgtgtgtgttttgtaagctttttactccttctcaacaaagcatttcaaggagccaacagcaaattagaattgaaactccattatgtctctcaggtcttctgatcagctcttattatacttactcttagtaaaataatctctattaatagtgagaagtaaggaactatatgatataataaaaagtgctctaaaggaagtcagaacattgtgtggaagtcctggttccaccattaatggtaaactctttgaggacttccaatttctccaggactggttttcaatctgtataattaaggggtttaggctagactctctttttattttttgaaacagtgtctcactctgtcacccaggctggaatgaagtggtacgatcttggctcactacaacctctgcctccctaggttgaagcaatccttccacctcagccacctaagtagctgggattacaggcatgcaccaccacgcctagttatgttttcgtattttagtagagatgaggtttcaccatgttggccaggctggtctggaactcctggcctcaagcaatctgcctgcctcggcctcccaaagtgctaggattacaggtgtgagccaccacacctggcctagacgctttctaaaattcttttcagtttcaaccttctatggcttttggattcttttatttcttatactttcatattactgaatctcataactcactttttcctccattttatattttcaacttttctagtctagggctctgcacaagttattactctgcccttttattactactccaaggtaattcatgttatatgtagatgtatattagccatgacaataaatctacatactgtattatcatctttccagaatttttcaaaacagaaagtctttcttgactaatcatttattccccatataatagtatgaagttattaacaaacgttccttgaattatgtgtgacagaatttgctgggagcttgaatcagtatatttgtttaggctgcatataacagaaggcttcatttaaaatagcttaaataataagagatttattgaattatataataagaaggtagtgatagaatgattctagtagtacaaacatgcatcaagaatccagattctttccttctttctagtcacccatcctcagcacagtagtttttgatctcagttttatcctcttatggtctcaagatgactacagcagctctaagtatatttatacaacttccttttcttctgtcactttttaagaaagataaaaactttaccagaagttccttaacagatttctttctcagatctgtattagaaacaaattcatcatatgcttatatctaagccattcattggcaagagaaatgctatgaaattggctgggaagtaatcatggttcatcctggtcctgggaggggcctgatctcccttgaagcaccaaccgcctgacacctgaacaaattctagtggctgctgggtagggaacaacagtgtctttacaagttggtgcattataaatacatttccataatttgaatcaagcctaccatctcctcctcatctccaaccacccgccccccccrccccccactttattttctgtatcttcagcaacttccagaaacttctcattcttccttaaatacacatttttgtacctgccatattttgcatgccctcttttatcagcctggaatgcactttgtcacctttgcagcctggtaaaaccatcattgtgctcatatttcaagaaccacctcaaatgtctgctctttagatctgaacccttcctgaattccccagcttagcaggtcaagtgagttgttctcagctttgtacttctgctatagatcagccctcatcattttataactatgtattgacccatttactcctgagaatcctgtaaggatgggactcagttccttggtattttgttctcagagagatgatgcttcatacttaccaactgttcaataaagtttgttgaattaatatagttaaaagcagatacctttctgttataagttcaaagcctagtgattgaagatttttctttacattatttaaatgtatttattttggtaaaatatttagagcaagtttcattccatctgttccatctaagcgattcatgacctgcatacattctaaatgacaggaaccacaagcaactcagtcagcaggcttcagaatcggtcatcctaaaagatattgcaggtcaatggctaatacactaacaaagaaagagcttatgcaaataagtaaggaaaatactgtttcaatgttaaatcattaaagacaaattcagactactcacaaagaagatctataaatgccaagttagaatagtaaaacagaaaacaaaaaaacaacatgaagacctctgattacatctatagtaattaacatatccatttaactcctctgccttcagaaaaccatcaatggatgtttataggyataaatgacaaggacaaagaaagtgggaagggagataacagcaacaaaattttggaagctgaaaaacmagtatacaaggggtatacttcctgatgaatgtaaaaccgtccctagacaaggggggcctargcaggttgaagactgagtgccattctgaaaacagagggattaaataaacacttatatatttgtgttcatgataacacaaggctttttaaattctgtttaccactgtgtctccggtggctagaatagaggctgccaaatatagatgctcaaatatttgttgaatgaattccgaagrttgaaagtcccaaccttcttcccctagtcagcttccaactatgcttaagccttctggacaggagattgatataacctttggagaattcaccaacccaagagaaaaaacccaaagataatggtgcaaggtatttctgaatgaaactgttcagttggatcatcaaaaagtggatgtagttgacaaatcttacctatgcaaacagagcttccaatctgatttttagtactctagccttaaatatgagtagacagataagatttatcaaatacttagaaaaagtaagtgaaagaaaccaaaacaaatggaaaaagaccaacttcaaagtacagatgttggccgggcgcggtggctcacgcctgtaatcccaacacttcgggaggccaaggcggggggattaccttaggtcaggagttcgagaccagcctggccaatatggtgaaaccccgtctctactaaaaatataaaaaaattagctgggcgtggtagtaggcaactgtaatcccagctactcaggaggctgaggcaggagaattgcttgaacccaggagatggaggttgcagtgagccaacatggtcccactgcactccagcctgggtgacagagtgagactccatctcaaaaaaaaaaaaaaaaaaaaaagaagagaaataaaaaagtacagatgttgcaggaagaaggtatcatcagagagaggagaagaaatacacttgatattgtattcataaatattaacattgcttccacgaaacaaaagcagatgctatggaaaaaaaaaaaaaacaactcagagaataggaaaagagctcttggaaagtaaaaacatgatagaataagttaaaaactcaatagaagggttgaaaggtaaattgaggacatctctatggaaatggagcaaaaatacaaaaaggtagaaaatacagaagaaaaagtgggaaatcagaggaccagttcaggaaatctaacatctaaaatcagaaattctagaaaaaagagaaaactgcaggaggacaaaattgaagaaaaatttccagaactcattaattggagcatttagcacaatataaagtattaaaaaagagacttgtgacttgttctaaggatcattatcgtatcgtatagaaggatcaaaaatcaaaagggcatcagacttctgaagattcgttttgaaacctagaaaagaatgaagtgatgccttttaaattccgaaggaaagtgattctcaaccaagaattctatactcaaccaaactattgatcaagagtgagcatggaataaagattatttctgaggtgcgagcctttaaaaaatgtatctctgatgcatactgactcaggaagctactggaaaacgtgctcaccaaaacaagggaataaactctaaaaacattacccttgggataataaggaaagaacatcccaaagtgacagctgagcaagagacatggagaataaccaatccaggtcaaagaggcctctggatgagatttcttcaagaagatgaatttaataaaattcttgatgtgtttgagccatacttagatttttgtaatatgggaaaagtttgggattgaattagtgataagtatatatggacatctaagggaacaaagaaactaacaaaagacaagaattttcaagaaggaaaacaaagaaaaaaaggtaatcagggtatgttacatagtttagctgcttatagtttttctttggttctgctcatggaaacacaatgactatcaatctaagtaagactataatatattagaaggatgggtgatgagaagtgtgaagtgttgcaaaggtaaatccttatcttccgctatgaagtatcaataagcaatgcccaaaaaaatgaactattaagaagtaactgtaaagttatatcatttagagatagagtggagtatagcaaatgaatcagctaaaatatttgaaaatgggtaccctctggggagtggaagatacatgtatgtattgtgggtgggggatgcactgcaggagatctctttttttaatccttgtggtactacttagttctctaaactatttgcatctataactttgctaaaaataacatttaaatttaaaaattgatcactcttgtaataagttcaaattgaaacaaggagataacatagttgctaagttttatttttggacatatttataacattgtatatgtgttagtgagaataccatgtaacatcactctcaagcagtacttctaaaagtagaaattgctgtaatatttctcaaaaactatctggcaatacacattaagaggtataaaaatgtttattccttctgacttagtacttctgcttcagaaatctcttacagtgatctaccttctagaaagactggagataaatacatcaaaatgttcacagtagttgtctctgagtggtagaattatgggtaaaaaaaagatggcttgtttccatttttcttttgcacccctctgcattttttccaaataatctataatgaagacaggctccttttatatttggaaataatttccaaatataaacattttaattttataacattttaaatttttcaaaacactggtcctcataacaagaaaagttatttgttgcaaccacagtagaccaggttaatggtgccaagagtggaatgcggataaaggctgacaaggccatctggaactgtgagtcattcagagcatcacagaagagagattttctgcaagtactagctgtgttgactgtgactgctgttttcctggttgctcaggaatcacccagggaaggagagggcttccccacgggattagggaaaaaaaaaaaaaagcttcttgttccataagagagtctacagataggatgagtaataagggatagattttactaaggtagaacaaaatgttaggacgctggtacgagcaccactgaaatatccctatatcaagttttagtcttttcattgcatcttctgaacctgctggagatgctttcacatggaacgtatttgctataaacttttctttatcttttgttcaatgctgtgaagtttgctaatcttaatgaaccaagtctcttcatgctgacaactcattgtaaaagaggtaaaactgtgtttccatggtatggggaatggagaggtataaggaggaagatggatttaaattgatttttggaatgcttgctttattttatcagttaaagaaaaggtctaacggattatttagataactttaggctccaactgcactgatctgtttgtcattcctttaagaaaccattttgattctgactacttgaatttgcacattttgttccttctctctggaataccctaacaaattctttctgcctgataaactacttactcttccaggtcaagttgaaatgttcccttcagtgtgaaaactttcatgactcaaaaaataacaattataataattacaatttgatgagctacctggctgtttacctaattctcacaccattagatgagcgaggtagttttaggctaactttaaaaaggaggaaactgagacttacaagacttgggtatgtggcccaagagtacatagctagatttgaaacccaagtccaaacccaggacttcctgcttaaagccccttctttttcaaaaactacattacctattgattattttgctttacatgtgcttacatgttgatcttcctcagtggactgccttcattccttaataggaaataaattgtcttttttggaggtgttacatttttgcatataacattaataagattaaaattttcatttgttgttgacattctttgcttgactctacactccacgggataggatccttgggcatagaaaccacgaatgctttgctcatcactgaatccagcatctgtcagtgtctgccatataggaattgctcaatatacatttttgagtaaataactgaactaacaaatgagtgaacaaaagaacaaatgaataaaaaacctcagatctagcccctaacaaaaaatacttaaaaaaaagttttagtgtctcaattgtctgtatagacaatgatttcacaagttcacgtgaaatacactaccaatatcaacaatcatgttaaatcaaatgaaatctatatcctctgggaatgcttgtggtatggcttagggacaagctttacttatgaacaatgatactgagacttcacaatagtcagctgtgcagatgtcagactttgcatttcacacatgcttttaacctagagctcaaataggcagttttaagccctggacctcaagtcaatgtggttcatgttttgtcacttcaagatctacaattgaacttcattacgatagtcttagatggtttttcataaattttgagtcatgaaaaactgacaacatatgagtctccaagtaccttttaatatatgcaatattttacctacttaatkaatacatgtgtttatttgataactaaaaagtttataaagtctagaaataaagaaaagtccatgtcctttttcttttttgttttcttttaaatgaaaactcatgagaaataagagggcagaatgcattaaattatttcttctgtaacagcacaattctatatcagattttaaatacaaaagaacatgcaaagggataacagcattgacttcagttctaatataaataaggcaggaaattgggtgaaatcagtttttcctctaatcttacatggaaaaaaatttgtcatttggcaaacccatatgaatccgatctgtttggtttattcatccatgcagtgacattcagactccaaaaactgtatcagaaacctagtcaatatttaaatgccatcatatagattagaaatggaataaggtataggtaacttactgcatttcaaaaaaagtactaattgaaacatattgtcaaacatatatctttttctctctttagaaacctatggctattttctgtctttcagckcacgctacagaaaggcctatttttccttctgtcttagtccattcaagctgctgtaacaaaatatcatagccaggcacagtggctcatgcctgtaatcccagcactttgggaggccgaggtgggcagatcacttgaagtcaggagtttcagaccagcctgggcaacatgatgaaacctaatctctactaaaaatacaaaaaaatcagccaaatgtggtcacaagcacctgtaatcccagcaactcaggaggctaaggcactagaatcacttgcacctgggaaggagagggtgcagtgatctgagatcatggcactgaaatccagcccgagtgacagagcaaaactctctctctaaataaataaataaataaataaataaataaataaataaataaataaatcacgagctgggtggcttataaacaacataaatttatttctcacagttctggagactagaatgtccaaggtcaaggcacggtagacttggtattttgtgagggctcatttcctgggtcatagatacgtgcctctggctttgtcctcacatggtggaaggggcaaggcagctctcttgggcctcctttataagccactaatccccttataagggctgtgctctcatgacctaattatctcccaaaggccccacctcctaataccatcacattggtgatgaggtttcatcgcatatgaatgtggggagggacacaaacattcagactatagtatctgctttttgccacagaatgaagaataaaccacgtcttataaataaaaatctttccatggtcccccaccacataaggacatgaccaacttcctttgctagtcatccatctctcataatcctctccagcccatctctgcagcctcatctccacccacacatgcattctgctgtaacaaatggtgggcaggcttccaaatgtactgtgttcccatgaagttgcacctttgctgatgttattctctttgcctgggtcccctccccatctattcactcctttctgcacttcacccttgctcttcttgtgccctaatagctcctccttttgtgacacatcaaaaattgcccactgtaggaagcccctccaagactaagagtgcctctctctgtgttcctgcatgtgcttttggagcccttatcacacagttgctctagaattgttagcttgaccacactgtgagttttcttaagggcagggacttattcctctttgcatatctggaatcttacccagtgtttagtacatactacatgttcaataaatatttgttcaatgaatcaatgaattgataggttttcttttagtagaaggaataaggtacattttttttagaacagcatccgaaaagcaagcaggaaaaattgggacatctttgcttaaggtaaaaatgcttttatggggaccacctttgaaactccatctacttggatccttttagtcttctttatgagataggaatattaattcttagatccaattaaagaaggtctagttaccaaggaacaaaacaaattggtatagaatggactttcttataagagagtcccaaatcatagatcataaggacaatcttatgttgaaatgtctcaataacttccaaatgccgatgtgaatgatatcatcaaacagtgtgagtcaaaggaagaaatgggattcctaagttttcattgtactccttgactattttattggtgtacagtctcttgacaattattttctcatcttctttcccaaggaaactttagatttaatatgtttattctgcaagatgtttggagacaggtatacaccctaaaaccaccattacaatcaatgccataaacttattcattgcctccaaaagtttcctcccatctttttgggtttttttgttttgttttcctttcatggtaaggacacttaatataacagctacccttttaccaaatttctaagtatacaatatagtattgttgattgtatacttatgttatacagcagctttccagaacttattttgcaagactaaaactttgtaacccttgaccacatctaccaattcccatcttcccccagcctctggcaactaccattctactttctgcttccatcagtttgactattttggattatacatgtaagtgagatcatgcagtatttgtccttctgtgtctggtttattccacttagcatgatgtcctccagttccatccaacttgttgtaaatgacaggatttccttccttttttagggctgaataatatttcattgtatatgtgtgtgtgtgtgtgtgtgtgtgtgtgtgtgtgtgtgtgtgtgtgtgtgtgtgtgtatatatatatcacatttcctttgtccattcatctgttgatggacatttaggttgcctctgtatcttagctattacaaatatgctgcagtgaaaatatctctttaagatccagatttcagttcttttggatatataccaagaagtgggactgctggatcaagttacttcctgtttcgaaagtagggcaccctctggacatttctacaactgaagtgattgattcttacttttggaagtcaggctatttgttggaatggtggggaaaaaagctagagcttaaaaataaatctaaagttggagaggggattattactgatggatgcattaattcaagggttactgatactctaaatacatttttaaaagttgtttgattaacaagtcaaaacagatggtttaatgacattttagagaggtttaatagagatccaactgaattaacaaatcaccatggtgtgcagaatattgaaaattcaccactagtagatttatggcatatttctgggtatttcattcccatttggtttattatgataaatcactgggaaacgggtagcctgtaggacatgacagcaaaccacactttggcaggaccagcatcagggctgcgtgcttttttaggaggctatgtagtctagctagcacagagtgacccagtgagagcttggttggctaggactttctggtggtagcccacagagctcacctgaaagagtaccaaggatgaaaatatcatcttggctaattggtctgctagttgatttaaaaaataaacaataaaaaaaatttccagtgtattttagcaaagtttaatattttgaagggggcagaaatgtagcatattttgggatcttaaatctgaatttgtgtctttttccagactttgtcagtgtctttgtctctctctccctctgccccctccatgtctccctccttccctccctccttctctctttcctttcctggtaagtatactagaaaaaagtatatttttttctcattttttttaacttaataacaacagcaacaatgacaacagtcaaactcttgaattctggtcacaatccagatcaataattttttccttgtagttaccttggaattaggttcttagcccctcactgctctctgtatatttctgtacaatattcatcagtttaaataagtacttcaatttcataccaaagtgccaagactatcctattttcactcatctttaactttcttctttttcatttcccacacccctgccattgccaaacaaaactgattatctctgtttttatctttcttttagactttttaaggcaataaaaaattggcttgctcagaaggctgatacactgagtgttagaataacccaaaggttagaatgctttggtcaacttatgggtatttttgatcacgtatatccatttttaaacctgccattcatgatggatcactgaccctggccctggccctgacccatctcaaaaagttactagcatgattactgattaacacttagactgttggcttgaagtttagtagcctgaaggaaaatttccagaggcattataataaggaagtttaattaagagttaatgttgactcaggaatattatgtatagcattgatccacagtgttgctaatgaattcattatgctgcaaatgcaagtgatttgttagtacattggccaataaaagtgaaatctgtctcaacaagaatgttgaaagaaagaaggcagtgaaactttcatctccactgggagtgaactaacttgccaaatctgggtcatcaatcatagtaaaatgttcaaaacaaataatgcatctttcatggttcactgtattcatcagcacttttgaagtcaccagtctagagtagtcgcctttggccaagttttcagtagcctgtggtttaggcaataagcctcaactgtctttctcgaggatatgttcccaggtggttgtactccatgggccattttcaatcaaatctgaaaggacaaaagggcagttctgtttatatgaaatgacatcatattataacctcaaaattgttgtcttaaaagtcaaatcattatctaaaaggtctcttagaattacttagagcttgaatgcaaaagactgaatttcccactcacgtacttcgccaacactcattacataggcaaaaaagtatagtaagtgtcacttatgtgagcctatgtatgtatgtagtgttatagggggtgggggtggcaggaaagacagctcaaatatgaaataattgaattattcattgccactgttctgattgcctttaaaaaaagttttatctggaagttatttcagacacactggaaagcttcatgggtagtgcaaaaaaaaaaaaaaaaccacatgcattcactcattgtaaacattccacctcatttgcagtatcactctatgtgcacatacacacaaatatacatacacacacattgtctttttttctctgaaccacctgagagaaaactgcacacatcatagccctctatccctaaactcctcgatgtattcctcccaagaacaaggacacttttctgtataactatagtctcaaacatctgattgcctttgaattttatagcatgacttatttatacctttttacttcgagttctaactcagatactgagctatagaggaacagctcaactattagttgagggatagctcagatgtctgatggaaaaaagtcacatcagtaacattttgaattctgcaaatatacacaatatgccaatgtatgggagataactaaatactggttttagagaaaatagatgagttaatacaaatagagattccccttaattaatagatcttatatgtttggttatatgtcttatccatgctattatagctagctagcattcattaggacagccagagaatcttgtctttctgtatttttatactgtttttcttcttctgatcagccgattccaggttttgaaagaatgaagtagttcctacttagataatgctattgccttgctccttaacagtaagcagtggagaagcagagtggacgctggtgatgctgcctttagtcctggagggagtgtcaaccagtgggtaatcattctgaccctgcaacacaaccatcccttcactatttcagtgaaggtctctacttcggtggtaggtctctactcaacatggtacttatagccgttttatacttgctatcttaaaaaaatatgcaggctttcactgctgtgaacagataattgatatttatgtttcataatctgtgaagatagctaacacatttctgacagttgcaattttttttcccaaaacgagtttgagcatgcctatccctctctacccaagtatatttaacagcatttctatctattggggaatctgagtgaggatgacaacgtgtcagggattagaatggacaggaagagtctctgtaagaggagggtgtgatgctggagcaatttatgaaaattgggtcccctggtaactgtagtgsatgttatacagacagtcctgcagagtcatccacgaggctgactcactgacaatgtacacatagaggtgggcctcgagtgtgtgcaaataacaagtttactactgcaggcaaactcttcgtttattcatttgacagatttatattgaggggcactgttctaggagctggggatttggtaataaataagatagtcatggtccgtaacctcatagagcttacacataaactgttttgctttaaaatattgtacattcagaggtgtttgtgctccgaccatatgactgcaatatgtcatttgataaacctttcaggcatgacttggacccacccagaacttagctttaaagctatcagattgacaggaggagagaacactggctttagatgacaaatcatggaaataattatgaaaagaccatccagtttttaatgactttacaagaatagtgttcttgtgagactattgaataagaagaaatatatgaacatttgtatcattcaactgtctaactgataccaacaccaataaatatatgaacatccttattattcaagtgtctaatgagtgagggacagtgcctgtaggaaggagagcctcccaacaatggaagcagtgttattcttcatggtagggagaccattttttggttcctcacaatgacttccaggctggaatgatttccaagtagggcagggaagacaaatatctgaagcctaagggaagctccagggtgattcttgtagttttgtttggcagactttctaaaaagcattgtcagatagttttggagcaagcagtttagccatctactaccacacaatatattcaaatcagagtaagctggaagaaagtcatccaacatccaagtctcagcctggcctatgtgaacatacttcttcttaagactaagctgtaggggtactatgcttattacctcggtgtgaaataatctgtacaccagcaccccatgacatgcaatttacctatatgactaacctgcacatatacccctgaacgtaaaatttaaaaaatttttatagatatgttaaatttgagatgtttattgaacatcaaagcaaaaatggtgaatgaacagatatatgacacaaaaaagactaaggtataatcctatatcatgagtgaataggaattttttgttattggtgtttgcgttagttgagattttattcagcagtaaatagagagatttaaaatagaagtggcttaaggaagacagatatttctccttcatgtaaaatctgaaagttggcagtccgaggttaatatggcacctctatccagtacagtcttcaaggacacgtgctctttccatcttattgcactgtgaggtgtagcctctgttgctaaattcaactcaccatccaatatggctgctccgactccagccatcaacttcacattctagccagtaggaaagagaaaacaataaatacaggcagataaaaagatagatgacaaatttctcttaagggaagtttctagcacatcatataatatctacataacgcttctactaccaactcattcaccaaaacttagttatatggcaacacctggcaaccaaggaggctgtgaattttctctattttgggcagtcacatgcttacatgaaaacaggtatttgaaaacaagtgatgaagaaaagcatcaatattaggggacatttagcagtctctgccacaatgttgcctattaataatcctgcatacattttaaatatttaatatcagtctgcaacactctatttgcaaggtaatgtatagtataatctttaccatatgaacttagtagccatggtgttcaggaaagttgtgttattttgtgctagaatattttacctgccctaggtaagggcctaaagataaaatgtgctagactaattaattttaatggcatatagcaagagatttccagcgttaaagattgcatctccacctgcaatttgggaaaggaaaaactgatagcacaaaataaaagtagtgggtgtcctgaaaactgtctgatgctcttcatgttcttaccaactcatatcctcatctaaatttgaatcacaggtacattctgaccttgtcgtagagagagtcctaaagtctcacgagagaattaccgtgcttgttctaacaagactgtgttccagcaggcatgccaaaatttgatagctacaaatagggagatttgaaaggaaagaggtgggagaggtaatttcttttaactcaactgcatctggtggattaaggtagacaatattaccattttgctgacagaaggcagacatggcactaaagagggagaatgagcaaccacagagctgatttaatttccagtggggtttatggaagcaccaaaacatgatgtagccaaatgttcctaaaagtatgaagtaatttaatttgttccatcattacaagaaattaaagccaagcacaattacatcccagtagtaaaaggaacccgctgaattgccattgttattgactaaatgaagtgagatttctgattaccttgtccagcacattttaatttctgtctgtccatttattccaaatcacattacagggccttaactgatcttgacaaaataagctacattattaaggtgcagtttaacctgagaagctttaattactagattagagttttcaaatgggcatgtcttctagacttcagtacatttagggatgtaattattagagattctttgtttctgatgtgcaaaagagacccaagtttaaaaggaagacttaaacttacggaagtgatttttttttttcttccaccaagagtctctttgtagacaggtgtctgttctgttgggagtggacttacacctcctgaatgctgtgattgagagagctgcctccatagtggaaagcccccggtagagggtagtacccagatttccaaggggaggggagttgggggactaaacgatgtacagtgaaccctctcataagtagggtgtctagatgatttagcattcaaaccagaacactttttagaatgaaaggcaatgctattcataattacactggtataacaggcatagaccttggaagttccaggccaattaggatgtatggactctgtacctataaggaagacaaggcaatagatatgtaaacaaatcaatgtgatagtcattataggcatctggagaatgaaaggctctataggacactgtgggtgggtgggcatggagaacagtcactctcttagggatttctctcccctggaacaaaagttacactaatcatgtgacatctcagagcatgaagtttgtagctccctcaaccatattcatattcctctaacagtccagttaatgattctcagatgcattagaaactatggaaatattatagaaaagaagccttaacaggggaagtgtttcatgctttttcagttccattcaacaaacatttattggatacctagtatatgacagccagtgtttagcaccagagatcaaaaaatgaattcattatggttccagccccagagaaattcagtctagtaataaacacataattgtgatagactgtttagtgatttaataacttaaagagttaacttctgatttggttctcatgcatcaaacataatatttgccagtctctatctctacaaggagccctggatttttcccagtcccctactaatgctagataatatggcaaaatacacaggctgatcaggctgttttagagactcttttaagcagagatcttttgttttccagactgctaatttatttttttctacccagaaagcccttcctaccatctgagctattctgaccaaatcagcgaagacaagctacagagatttaggatgtctgggctaaaaaggtttgcttgtttaattagataaataatttgagaatgctttccaggattactgttcctaaccacattgataaatgctgggaagactatctcagttatccagcattggataacagactgttggagaagagtgaagcttcagtgtgagctgggaaagatcccaaaaatcctaacatgctctaggtgcctgcatataaaattcatcatcatagtgactttaggaccacttgctatttttcaggcactgctttacatacatagtcctatttaaataattttcagaatcatactgtgatataggtactgctttctccattttataaattagaaaacaagctaggttaattcacttttataaggtgccaagctagtcaatcagtggcaaagctcagatttggaaacaaggactgccttactccaaaaactgttctcttaaatttcagtgtttgtaaggtccctcactgccccagcataacccagcatttggtccattcaaggattaagaggaacagggatctgccagccttgtttctgcagaaaaaaatgggggaggcagagctggatctaaccaaacaggttaaatttaagtgccaggtttccgtgaaggagaattatgccagcaatggtttctcaccttaatgaattcatttctaaccattctttgccctgcaaagacagcaggatcctgggtccacagggcccagttcatggagaggagaaagaggcacataatgggagcaaaaagtgaagaattcaagctgcaaaatgtaacggaattctcaaagtgctgggttctcttcactcccttatctggcagctcctgttttttctcctttgcctcccacagttgccactttaaaaagtcatttttaatgtggcacatatacaccatggagtactatgcagccataaaaaagaatgagtttatgtcctttgcagggacgtgaatgaagctggaagccatcattctcagcaaactaacacaggaacagaaaacgaaacactgcatgttctcactcataagtgggagttgaacaatgagaacacatggacacagggaggggaacatcacacactggggcctggtgggggttgggggagcaaggggaggaagaacattagtacaaataccgaatgcatgcgggtcttaaaacctagtttgggctgatgggtgcagtaaaccaccatagcacatgtatacctatgtaataaacctgcacgttctgcacatgtatcccagaacttaaagtaaaaaaaaacacaagaaaacaaacaaacaaaaaaactcctttttaaacattgtctcagcgtccagtcggttgagtttctgcacttttagacactcaagccccttctttcgtcctttgctccagtggttgtagcttcctacctccttcttaccctcacccctaggcttccactttagagaatttggagaactggggaaagaaaagactgttttgtgcatggtgtgcctgcagcctagtgccatgagctggttcttgccgtgtctgagccaccagatccactccttctgtggttcacacgctattccctctatcccagccaagcttgcaaactctgatcatgaactaccaggtggaggsggggcatggatatcctccccaggaagcctgtctggaacctctgaacttttctgacctgtgcatgcctctaccacagcacaccttaatttcttttgaaatcactgcatttgttcatttgttagttgtttgcttctagatggtagacgccttgaggccagaattcttctgaactaagctttggaagttgagcacctcatagaataccaagcttctcgtattactggtggggttcaacaagtatttgttgagaagtgatgaatcaagctaaagtttaagtaggcaaagatgaatcacgtcataacctctggtttccyaactttgtctatagaaaaggctccttgctaggtaaaacaaaaacagaagaagtatgtggattctcttcaactttgggactcatcaccctgaatctctcagttatctcaagactgattccctccaccctggagggcctccctgcccctcctttgtacagcagtgaaaggcagaaattgaatagaaggagggaaagagggaaaaaggtctagatgatcaagtggcaaaaacaaataacccagcatgaacaagtatgcagagagggaactctgaggaaacttgctgacaaaagatagagatggaggtgaggtcaaccacaggggaataatgggggcagacaagtctaaggaggtagattttatagggacttcgaatagatgaactgaagtttggggaagacctaaaggcattaaaaatccagtataagttcttgattaaggacagatatcataataattattattataatacaaggggtgctttgggaacataggctatgtaggagggattgacagaggaagggaggaaagatctaggaaaatgagggccaaacggaaaggtgtccttctcctgttcatttgccaatgaaatgcctaggatatatggtggtctgctcctaccctccacagttctagccactgcaaccaggatgcccagcaaccatgtcattcattcattcatatggtctatctgtctcctataggcatttcagtgagtggccgctgctttatgtgttctgttggtaaacttgtagtaccctgagaaaactcacacattatggagaaattacttcaaaaaatatgcacagtagttaactgaaatctttttatgtgttctactctcacgtgaagtagagaagtagagggagagttttttaattataaaaagggaggaagagggaagagggaaacaaaactaacatttattaagcaaggtaatttcttacctcagtgttttcaaaccaattggtagatttcaaaatcaatttaaggggtcacaattaatactttaaaattaaatwaaatagaaaacatcagagtgaatcatacatagtaaggataaatgttatttcatgttaaattatgtttcaattctctgtattggctcgaatatatatttactcttatgtgtatggtatatactgttcctatatatacatttcctttttattttatatatataattctttttattggtttaatttatactgaaatgcatggtttgttaaagactgtaaacaaattttgccatgactattatttataaaacacaagagtttctttaaataggagtccactgctctcctctaccttttaaaaataaatataggtataaaacctttttgtacattttttttatattactgaaagccagcatccacatgccttcaaaagtgagcacctcttactttaaacaaatctaccaggttatagtataaaatataaattttactgtagtttactgtcaataaactttgtaagccactgcttcatttcatttaaacttccccaaaaccttgtatgagtggagtctggggattcagaagaagacggtggtcatcacagaagttgaaattctctactgtttacttcttttcaaaggtcttgttagcggtggccttgaaggtgatgaagaaagacactttcaaggtggacaggtataattattgggtcaccaagaacaaatttgaaaaacaaaatatgccaattgaaattagcatgtagcacctaaatacccagaagcttcttcattgaataatttattcattgaataaattatgtaaactgaattagtaattcctagtgaaatagtggatgaattgagaatagtggtattggtaaaaatggaaaaaaatttttttcttttgagacagaatctcactctgtccctgaggctggagtgcagtggcacgatctgagctcactgcaacctctgcctcccaggttcaagtgagtcttgtgcctcgcttgaggcacaagattagatttagtagagatggggttttgctttgatggccaggctggtctcaaattcctggcctcaagtcatctgcccacctcgacttcccaaagtgctgggattacaggcatgagcgaccgtgcctggccaaaaaaaaaaaacaacaacaaaaaaaaacaaaaaacaaaacaacttaattcataaaacttaattcaacaatttaagagttatacttcaagaatgaagatatataatgaaaatatgaagtcttcagaaggacacacatataataattttagtaaatctcaaatttgtctcaaatcaaaaacttgctacacatatttttgtcttaattatcataattaaaaatgtctacacattacataatactatctagtaaatatgccctagagattgtgtgtgtgtgtgtgtgtgtgtgtgtgtgtgtgtgtgtgtgtgtatgtacacccattatgttttcagacaattggaagaaaattgttaggcaattgtttttcttttatcaaggagctgtcatttaagtgcaaagctggagtattcaaaataaaatttgggcttacaagatcagggcatggcaagacctatccagattgctgtggaataatatatgcttccaaacgctaatcttaaggatgaaaaacacataaatgacatgccttcttccccttgcttaccttagtgactacagtttaaataatctaaaatagcagataccatcaatactgttgctaattatgctacttttcagagaggtacaagagtccttgtacctctagtagtagtgataccactactagtatcaaaaatacaagattgttttgttaattttgaccatgttttaaaaaaagatagggaggagatgaattactattaaaagcagctcttatattttacatgtaatagatgataattacaagtttttaacaaataacacatttaagttgaactgaaccgccaaaaaagatagagatatgaatatatgatttttagattaaagttagttttaacattcaaataaagtgtgggaaaatggcctggaggccaccttctagggaatgtatttttagccctattttacaaaaaagaaaactgaggtacagagaagttaatttgcccaaatttgccccatggttgctaagttgcagagccagcatttgaaccactgttcccaagtcatactctttctattgcttgtaactgtcatcgtagaccactaaagtggatacctccacaactctttgctttccactgcatctggactaccacaatagctccttagtctccatccttctctcttctccattctatcctcttaggctaccagtgcacttatccaattcccacaatatccactagctcaaggccacacatttaagtgttcaactctatatcccttctcctccctggaatgtgtctactccacccagcccatttactgtccacacatacaacctttattcaggctgcagacatttcctacacctgaaaacaatgccagcggactccctcctcccacagccattaaaaccacagtcttccttgaagacctacatccaagttcaccttcttcctgaaacccagcacactgagctatagtccatacctccctctccctgctcgaactacagtagcactcccaggctgaatgatttatatgctaccttacactgtctctaggcagcagccgatcatgtgtctgattttctcagcaggttattatggttccttcctgggcccaggctgctgaatctttcatgttcttgtatttcacagcaactatcacatcagagaggctcaataaatatgtatggattttttgactattctctttcagggggaaaaaaatgagagaaagaaaagaagaaagggagggaggaagattactctctgaccatttctcgatagcatacaaagtcaggaggaagagaaataaaatgtcgttagtggagatttcaaccatatgggaacctactaaacacatgtatttgttaatgttttggagttacctgacatataggtataggtataggaaaacctattccaggtattcttcaagaggtgatagttgttgtgtgaaaaatgcattctaaaatcaaacaggtttagataatgcttgttaataaaattaaatatctcattttgctgtggaccttctagcttttggtaggttcgtgtccattagaaatcactgtaaaaagcctacatatacaatatttcccaagcttgtttgaccacaaaacgtcattagtaaggagaatcttataaggacaatattgattggaacattctttgggaaatgtttgaaatgatcttcccagtaacctcagtgtaagtgatgctctgtcattaaccaatgacaaatacatattcttcctacatagttgacttttcatgatttggtgtggtcttgtaaaagctattctattttgttgtttgtttgtttttgagacagagtctcactctgttgcccaggctggagtgcagtggcaaccatctcctccacctccagggttcaattgattctcctgcctcagcctcccaagaagctggaactacagacatgtgccacacacacctggctactttttgtatttttagtagagatgcggttttgccatgttgtctaggctggtcttgaactcctggcctcaagtgatctgctcgcatcagcctcccagagtgctgggattacaggcgtaagccactgtgcctggtctaaaagctattctaaatcataggttgttcactcacatttggctcagaactggttaatatttgagggttgatggtgatgatggaaaaatagtaactgttttaggattgagaatctgtggaaaaggaaggaaactctcaaatattaactaccttatttaaaattaacttatttaaacaactctgcaaagtggttcagtatacctactattgattgaataccttctatatgtcagatacagcccttggtactttacatttcttatgcatttctcataataaccctgtaattctcaatgtatacaatgtgctcaggtcttttaaatggcttatttcagataatacaactagaacaatggcaaggctggaattcaagttctgagtgactcaaaagtccatgctctttctgatctatcacactatttcccatgaagagctcttataggttgtggattcttctgtgtgtataataactttcttagccaaatctaaatctccatagatattcttgtaaaattataaaactaatttatcttattcgtgtatggagccagttcatatacaactggataagccaaatataaccgatatactcttgagttctgaaatttgttctctataatgcacacacagttaacaaatgtaggtttaccagtaggccaaaatagtttatcactcatatgtgttgcttgtaatgcaagtaatgagattaaaaattgtacataagaaattacctttctgagactctgttcatagcctgtttaaaagggcctagtcttttcrggaaatcttttgtgtgttttttcttttctttttctctttttttgggacagagtttcgctcttattgcccaggctggagtgcagtggcacaatctcggctcactgtaacctccgcctcccgggttcaagtgattctcctgcctcagcctcccaagtagctgggattacaggcacccgccaccatgcgtggctaatgttttgtattttctttagtagagatggggttcatcatgttggccaggctggtctcaaactcttgacctcaggtgatccacctgccttgggttcccaaaaggctgggattacagacatgagccaccatgcccggctgtgtgttttttcttaatcccagtcttcaactggacaaatgtctctttggcattacttcttaacccttaggtatctcatagtgagagagatataaatgctaaacagagatttatgagaaagttaaaaaaaagaagaagaagaaagcagagatagcgattccgaataaaagattctggggcagtgttgattaaaataattgctttcttttcttcactcaggaaagtattcttaacttggagtccttggtgacttcagggaagtcagtgaacacttttagagtgaaaaatattgataatatgaacttatgctcatttttctgggggtgtttgcatcagatgcacctttgtgcattcatctgtttctcccaaacatcatactggtgtattggtgaattcttttaaaattttactctattttgtaaggatcattacatatgaatgatataccataatacttgtcatttttattttaatgttaatatttcacttcagtaagacaccatgatctgcttgaccattaccaaattttggcaatgttagttcctaatactcttttaaaaaaagagaaagagtttgaaagcaaaagactgagaacaagagatagacgagggtgattacatgtaggaagccacacccaggccagtattactgtttgaatctcrtttggaaataaatattcttatctgatagaaaacaagcatacttactgattattcactcacaaatatttgctgagtgcctgtaaatgtcaggaattttctagacagttatagaaaggcctagacacaaatataaaaatgacattagaaaagtcatacaggcagaagccagcaaattatttccaggtggaaagattggctaagatgggcagtcttggatgggatagtcttagatgtaaataaaagggaaaggtattgaaaagcagccgaaaaaggcctatgtgaacagaagtgtgacattaatacaataagtaggagagagttgtgcagcaggttcttaaaagaatgaaacaataaaaccagggtttaaggaagattattctgactttataaataggactgtgttgagaaaaagtgaatccaaggagatccagtagtagaccattatatgaatctagaaatacacagatgagaatttgactgaaggtgacagttacagaaattaagaagaaattggtaagtcaactggcaaagtattggatgggaatatggtaggggtaggagtggagataagcagagtgagtgtaaatatactccagaactttctatttattaatagctttatttctgagaatacctcaatttcaaatagaaaacatgtacccctgaagaacagttgagctaaactcacagaattccaggatcatggtattggatgggatccttgacaagtaactggtcagtttaggaattccctctacaaacatagctgaccccatccaggctaactataatgaacaaccttaaaaccaacacctaacccagatagtacaatttcagaaatcagataataaatgaatgttagagctgggtaggtgctaaagataatctgttcaaactccttgttttctctaaggaatactgtatgcagtaattgacaaaggtgaagaacaaaagactgttatatcctaagattgatagtatatgatggaaacacagatgctctcctacagtccccccagggaaataaaattgattcctaaaattacaacaagaatacgtaaatagcatacataattgtaactttttttaaacctgtttgcaaaaattgtcctgtaactttgttcaaacaacttcccagacaaaagcttcctcagtagcattctttaacaccctctttagtcttgtgttgctgaaatatgtgtttggaatgaaaattatcttagcgcaaacctgtgggtatatacggtctgtactgaatatcaatggcaaagccttgatatttgtcttagctcaagctgctataacaaaataccataaactgatggcttaaacaacaaacwtttatttctcacagttctgggagctggaagtctgagatcagggtgtcagcatagtcaggttctggtgagggcatcttcagggttgcagactgcccacatagcatgtatccacatggtagaaagagagcaacctctggcctcttcttataatggcacgaatctaattcatgagggctccattctcatgacctaattacttccgaagggctttccctccaaataccgtgacaccggggattagatttcagcatatgaatattggagagacacaaacattcagtccataacaatattttcctttgacatttcctttttctttgctcctgagagtttttcctcctaactttctgcagcttctccttccccttcagggactgcttaggattttctccttatctggtcaccaacctcttaactggtctttacttttctgatctgcctttatactattcccagagtaatctttttgaaaagcaaatctgaccatgtgacttcctcacttagaagatttttaatggcctctttagaagaaaatattgtcttagaatagtatacaagtcctccaagactagttctccatctttatctttgtccactgtctgatctaaactttatatccctacctgtttgtagcttcctgaatggcctgtgttctctaagtgaacttcttcagaatgaatccctgttcattccttgaaattcttttttctttctaactaccctaaaaactgttccaggtawctattaagtttctggaccccgaggttatacctaggtattagttgataggctcactaaaattaatagaatgtttgcatttaagttagagacttgagtccaggagaaagtgaagatacaatggaggaggaagggaaaagaatctattaggcaatcaatgcaagattatttaactcacaacctctcacttgaactaaaataacttacaaggctcttgttattatctccaatctataggtgaaataaggccctagaaagattagtagctgaattgcctggaattgcttgtatgaagtggaatagagattggaatctttctccactcttccagtttctttcaaagaataatatcactcacagttgcacacatgtcacatgaagcccccaacctagatgcctaattaaacttagctcaaactccaattttttggacaaaaggcctccttattcttataaaagctttctcctctttctttgactcttctcttatgtcagctcagagagacatttctgcttgggccaatctggccttcaagctcagtcccttcaatgaataaaacaaaacaaaacaagtcgggattttgtaccttcagtaaccttattgacgattgggagaaagggaaaatgcacgggttggagttaccctttagaccaagctgactcctttctcttatatgcacacacacacacacacacacacacatcttcaataaccttattgatgattgggagaaaggaaaaatgtacaaattggagttaccctttagaccaagctgactcctttctcttacacacacatacacacacacacacacacacacattctctctctctctctcactctttcatgcccttacatacatgcacacacagagaccaagctgactcctttctcttacacacacacacatgcatgtgcacaaacacacattctctcgctctctcatgcgcttacacacatgcacacacatacatattccctctctagcaactggcatattcctcccctttcctgtgtagatgaggcacagattagttccacccaaaccaaagctcttcaaagtctcaccttctgtcataaatagctttatcgaacattttaatgcaggcagactctcgtgaaagaaattctggtgaattccattgtttttttctccatcttattacagtatgattaataagttagtgactacaaggttgtagtttttaagagcaagaagtccactccctttcaagtcacattgggcagtccttctgttcatacctgacatattgtgggaacatatgtctgcgtaggattttaatacagagattgtcttagataagaataatcgtcagagaagcaaatggtctataagttatttaattttattcttaatatggtcaaagataatggttgcactgacttcaactttactttcttmaattccattaattgcatagcactagaattttccatataaaataaaatcagatcccatgtcacacagtactctgagtcactctgtgactcctactcttgaagatatagtcctacctgcagatgcctgacatggccagtctttgagatggccagtggctgaggatttctcagatttctccagaatctgttcccctaagcaaggccctactcatggttatttcttttttgacacacacatcttttttttttttttttttttttttgagacagagtttttatgctcttgttgcccaggctggagtgcaatggcgcaacctctgctcactgcaacctctatctcccaggttcaagcgattctcctgcctcagcctcccaagtagctgggaatataggcatgtgccaccaagcccgactaattttgtatttttagtagagacagggtttctccatgtggatcaggctggtcttgaactcccgacctcaggtgatccacccacctcggcctcccaaagtgctgggattacaggcgtgagccaccacgcctggccgacacagacatcttgttcatcataggtctgtgtgcttgctcatcttttctcttaaaaatccttcccactctcttttatttcattcttgaggactcagccttttcccactccacctctgtccctgtctgatttaaatagtcctcttttactgtcccatagcccacatgcttccttctgtgagagtgcactctacagttgtttgctgaaattacctcctctgctggactctgggtaagggacacactcttttcatcatcttgtttctgcagcctctaataaagtgcatggcacatagtcagtgctaaataaatgttgagttactggtgggactaaaagtcaatgaaagccaacctcatgtttatttcatataaaaattctactagaggcataggcaacattcggaaaaacaattgtagttagtgagaagataaaagaaaaagaaaaccgtcacaaaattgcacacatctttcctttggaagctttatgaagtactaaataaagttttatatattttatacaattttaaaatacttcaaaacaataatttgatgccagaaatacacttggagatgagagcagcttgccactagcaaactctgcttaaacctattacatgtacacattgaaagagaatccaaagccttcatgtatttcccatcagataaaatgtatagaggaaaaaaaattaagtcagcaaaagttagacctaacctacacaaatcttttactgtagcaaactaaaggaatgactagctcaaagcaatacacggtgaaacagaaatcattttttccagttctatctactgtagacagtatcaattccttccktagaacaaaggggaaattttgtaagaattaagagaagagaagctggaactggttagggagatttaagtatttgctcttaggagctttttgttgtagttcttttatttttaaaaaatctggatcagtgctcatcatgactggccatcagagaaatgcaaatcaaaaccacaatgagataccatctcacaccagttagaatggcaatcattaaaaagtcaggaaacaacaggtgctggagaggatgtgaagaaataggaacacttttacactgttggtgggactgtaaactagttcaaccattgtggaagacagtgtggcgattcctcaagggtctagaactagaaataccatttgacccagccatcccattactgggtatatacccaaaggattataaatcatgctgctataaagacacatgcacacgtatgtttattgtggcactattcacaatagcaaagacttggaaccaacccaaatgtccatcaatgatagactggattaagaaaatgtggcacatatacaccatggaatactatgcagccatraaaaaggatgagttcatgtcctttgtaggaacatggatgaaattggaaaccatcattctcagcaaactatcacaaggacaaaaaaccaaataccgcatgttctcactcataggtgggaattgaacaatgmgaacacatggacataggaaggggaacatcacacaccggggcctgctgtggggtggggggaagggggagggatagcattaggagatatacctaatgtaaatgaggagttaatgggtgcagcacaccaacatggcacatgtatacatatgaaactaacctgcacattgtgcacatgtaccctagaacttaaagtgtaataataaaaaaaatctggatcagttgttataattttttttgtttttttgagtcggagtcttctgctgttgtccaggttggagtgcagtggcccaatctcagcttactgcaacctctgcctgccgggttcacgccattctcctgcctcagcctcccgagtagctgggactacaggcgcccgccaccatgcacggctagtattttgtatttttagtagagccaaggtttcactgtgttagccaggatggtcttgatctcttgacttcatgatctgcccgccttggcctcccaaagtgctgggattacaggcgtgagccactgtgcccgacctcagctgttataatttgtattttttttttaaattaagggcatacaaatagtgtccaaaataagtggtattttttggacttgttctcttcatgtataccaataggtctatctaggaattatgacaagccgatacagtcctttagcagaccttcaagtgttggcaaagaaactaatgtccacatagttacacatcccgtacagtggatccttttacctcaatggtcaacatcactgtgagttgtgggtaagagtaatggactgaacatttcacaaaaaatgacctcaacctctagctaactgctgtggctctgaggtgattacttttttcctttttcaaaaggaagctgcttcttcagcatcttctcctggagcccctggcacagtttcaggccatgtgtcaggggaacctctaagcatatcactgtgacagaagccaagtgctggcccgcaagaattgaggactgtttgttcacagaagagcctcagcagaatgcgggtgttacatagttcaaaggtgccttgaagaaaactgatgctgttgtagcaggggccttcaaggctcaatttatttctcagttgctgttccatagccctctcccagcctttagggagtttagccaatagtttttgcktgggtgtttttctctgtttagttccttgacttagcaagatttggtgcagttaaagagttttcatgtatttttaaggagagccacagtgtatactactctggcaggggttgaggggaagtattttattaatgaatgcagtatgtgttcttggtaaaagccaaaattaaactggctcactgtttttgtcctgctagctgtcgacatttaggtgtgttgcttggtgtggtgactcaatttcctgtgggatagttggcaactccactttgaggtttgttcggcgggatgaaaaggtcagttacttgatgtcttagaacacttggggttaaaattcctaaaagtgaagctttacaaatgatcctgaaaaatcgtggctagctatattgcctactcacctaggaatttggaaaaaagcaatattctcagctctatgctaatatcaagaataattctttatttgagcaacagtttcacagagcaaactttactctgttagtaattattttctcactagcatgtagatgtgttccagtgatttttcatttttcttatttatacagatgttagaacttaaaatatatgcttaccccattttatcatcatactcaaatcctgtctgtcaaaagtggctggtgcatggcttggacataaaatggatattctgaagtaaattgttcctcctgtcactatactaccttcttaagaacaaatcctgtgtataaagtgcatgatgtcttgaagcattagccaaaactttcctgaattattttccacattaaaaaataacaactgaaatataatgtgtggagccacatcctgttagatttgaagcctgagtctgaamagctttgggaacttggtgaagatggaggaagggggcagtttacttagctactgggaaatcacttgaggctcaggctttgagaaagttggagtgcaggggagaggagccacagaamgccgaacctcagaggggactcccagcttcattgtaaccaatgattgaaaagatggcactgaacaaatcccagacacaatggttatgcatctttaatccactggataggctaactatggacagctcaaatgatcataaaacaagtcaatgtcctcttaaaatttcctacattcctatattatgggaatgagagagagaggaaaatatcaaaaccaaaccatatagtagatgcactaccatggcaactaggtgatgctatacttgcatatggaagttattcagtaaaatgaaaatgattgtgttagagccataggcgaaagtattgtttgtgatctttagggtgtggggttacaatggacttcctatatttgtgtgtaatgcttcaatttttataacaagcatgtaatattttttacattcttagaattggggaagctatacagagcaggtattttatatttaccatttaaaattattaatatctttaagcttgttaagggggaaaaaaaagcttcaatctgaaactttaattcacctggcaaggtttaggcagttgtttgtccatctaaagtatatatttacatagactgcggggtggaggaagtagaacaaaaaagaggcaaattttaacctagagtactcaaagtgaacagtaaatagttcaagtattcttgataacaataagccacgtggcacatgtaacaactactttaaaagttactctaacttttacaaagttcacataaaaagctatctcaaaaatcccaggagcctaaattcagtccatgaactttatttgttgtgccatgttaatttatggagtctaaatttcaagggcagaatttcttctccaatacctgtagattcaaagacaaagacaagggatcccaccacttagtgtaagtttctcagtatcttctttccactcgacaatgacaaagttttatcaaatggacccttgggagtttgacttctcctcactatgaatggtttgcttattgcatgctaatgtagaaaagttctcccacaactgatctgcttagggacagtgtccctggtgccctgggtcagcctttgtaaacagaacaggcttttctgtatgcctttgaatatggtctttccgttttctcaaaattgtagtgtactctgcacatggtgggtagaaacacccttccagattttcttccttggcccaagatcatctaggtcttatgcaattcacaggggaaaggagtagtatgcaggacatgcgtaaattctccttaccatgtggttctttcacattgctgttcctttaagagaactcttaggcaattcggcatatgaaaatgcagcctattgtcaaatttgtgaattataaagcgttccgaccccacaacattgtatattttgtttgcttgtttctgtccgccccaacatttagaagtctggtacttagtagggactgggctgggtagaaaaagaatgcggtcttaattcccacaaccctgcctccttgaagtaggtgaatcctaagcctttagaaacgaacccccagaaaccctaaaacttaaaccctcagaaaccttgagggtcctaaataaccttgtttgtgaaacttcgcaggaagcagccggtcgtggagtcgcagaggctccagcggtctgggcaacctggagggcagtggctcggcggggcgcgcggtggttctagcgagacaggtgcgcggccgtgcgcgcctgcgtgccggtccctcctgagccccgcggcgggcgcgaccccggacggcggactgcaggcgctccacgccgggttttccgccgctctcctagcacagacagtcccacagcagccccacagacacacacgctcgcgcccgcgcctcctcgtctgcacttcaaagcgagtggcgcccggctgcgcsggggggatggcactgcgaggtggcggggcccccggggcagagctcgaggggaaggacgcggcgggtggcacggacagggacaggcttttgcaattcggaatcttttcgtaagggggttgaggaggagccaggcagcgccgagggccgagaggggcgtgagggggagtgttcccggaaagctgcggcgttggaagccgcgctgcgcctgccgcccgaggagttgagaaagaaaacaggaaacgtggtggccgcgcacccggccgcggctgattcattcacttcaagtgccgtgcagaaggctcggcaggcggggcgggcgtggggccgcggctccgggttggggaccgaggagatccggctgtggaccagacgctcctctgcggggcgggcacccaagcgcgctcgccaccccctcgccatccgctagagccgggctcctggactgggactcgggcccgccgcacagttgaaaagtcgcatagtggtttttccgctcgcgtcgctgtgtgaaagttggctcgccgctctttgcacgccctccctggaggccgacccgagacgccaagctggagagaccgtgcctccccgaggccggccgccccgcgagcacagcctccgcccccgttgcactgccgggctgggcaatatgaaggagcagccctcatgtgccggcaccgggcatccgagcatggcggggtatggcaggatggccccctttgaactcgctagcggacccgtgaagcgcttgagaactgagtccccctttccctgtctcttcgcagaggaggcctaccagaaactggccagcgagaccctggaggagctggactggtgtctggaccagctagagaccctacagaccaggcactccgtcagtgagatggcctccaacaaggtaagccccggttctgctgtcactggtgcccccaggctgctgattcccatgccggcgagccactggtacccatagccccgggaaataaattgagaggttttttaggcttactgcatgttggctattctgctccttagagggaggttcctgtttccttgctttgcctcccctagtcacgccagataaacattttccaaaagcaatttgacgtgctaaatttaagtatctcccaagacacagggttcctaagtaacactgagcccttgcagcagaaacccagtagggtccatgggcattgcatgtttaaaggtgttcttgggattcccggttgaaaataagaattggtggatgtctgtgaaatcacttgaatgtcaccacctagggcactcaaactcagaagagttcatcgaacttggaaccttcaccctaattcatctagttgtcagggtaccccgcaagaactgagcctttatatattcagttggccatacatatccgcaggaaacattaacagagttagaaggttccttatgatcattacttttgtttccattaatcttggaaagaaagcccagttttttgaggtcatttagtacaaggaggcttcaactaggcatctgtgccatatgtgctaaggtgctggtcttggcagttaatggagttttgagggctgagaagtaaccttcagcctgggacagccttaaaatagcacggaaggcaaggtatagtgttttcagttttgctgtattttttggatttcctgttctttttgtctttagttatgcaaggagataattggaattgtgtatgtttttagtggctatttgcctgtgcatgtcgtatgcagatggctgaaggattcagccagtaaggactggtaatgttgtgagacaattagtaatagttgcctcgtcaagatatttaagtatttttggccacctatttacaaggtcaagaaggttatattatcttacagttcatctatgtgcacatatctttaaatgagtgatgctttttttttttctacctttctatggtttttatcccacctgttctcatgcagtttttacaaaaaggccacggcataacagccacttgattgtcttatctattaacagtgcttttgtaggtagcattgtcaagtgaaaagttggcttcaaataaataaaaggggctctgtagacacggccagcagatactaacctacccatatgcacactgacctacccatgtccacactgatgatcaatttttttgtcatttgtgcctcatttctaaatttggcacagctcctcatcagaatgaccaattattgctctcttactgggacttttaccccctgctgtrgcattaggcacctttattctcatctgagtaacaaattcttagttttataaaatatagtttgttttcataatttgattctcaatagcagtagacatatgctgaatatgtccagtgtcctaactgctaaatgggagcactttgccatgggcctgagttcttaattctattgtgtggttgattctgtgtaagaaaatgaagagcagaatcaaaagccacttagcaatgtgcaagcattagtgtatrttttcaaggtgattcgacagtagtttttcagctaaatgaatttgagcagctagttactttccctaaaatccatattcttaatgttgagatctatgtttggatttaaaactgaatgtgaaatttaataatgtattgtaaatgacttcagctgtcaaggaattaatctatacgttaagatttaaaaattttttaggtcataataattgcctaaaatgattcctttcttttaaaggcaccagataagacagggatttaaaaaaaaaatctttattatgaaggccccagattagactttgagttaatttacaggtttaataggagaggttggtctgtttggttaaaatgaaatctaggtaaagtgagaagataattttttcaaaatgtagtcattctagcaatgtttatgtcttgtggctgaaaaattaggatattttttcctagcccacgacagagctgaattgaaaaattattgctgtcacactaatttttaacattaaacttagctcagcttaagctgttgcttaaacttttaatgtccaagccattcgtgtcttctttaacttatttatttctaaatcagtgctaagcttacatgactgttatagacaaaaaagggttagcacagaaagaaaaaaaagctcttgctaaaggttgtaaagttacccttcttcttcataacaagggcatgaataagccacatccacaaaagctgtaaactgagttggagcagctgatcggaaggcccctgtgagtgttgccacaccttcagtctgaactggaaatgtgtacagcttgcatcatctccactcagttatttgatatttcttgagtatgaatgaatgagtcagaaacattgcttttcagttgttagttttattaccatccattctttttacatacacgtgttcaaactgatattttcagtttattctcctttagcctttgaaaaattatgacagttttctgtgttctctcttgaggttttaaaaaatttactctaatagattgaaaagcacaataaaaacactagtaagagatcaggatttttaaatggtgatagagaatacttattatggagatggatttaggtattaggaaggaggaaactgattcctcaaacccatttaacaaactgggttaacacattatttctgtttcttagacttctcaataaaaggcatcttagccaattagcagcttttaaatgatgctctaggagcaactagctgtatttcctgtattggtattatatatgtttcttgcttgttgatggcattgaagcaggaaaattattgaattcttggccaaggctagggttggctgtaacacatgtaggatgcttgtaccaagtagggtaagagattccagatggcatttaatttgagtgattaaatctatggcatttacccttataagcacattaatctgcctgagatttgtacagatttcctttggaacctcattgctacaattgagggtaattttagtgaggtctcaaagctttggaggcaggcaaacctggaagttgaattatggttttgtttcttgctaatggagttacattagagaaatgacttcaattttttttagcttcagtttccttagcatacaatgggcaccataataactatcttgaaaagtcagtgtaagagttcmaaagaatatatacaaaagagctagctaatatagtatctgacaatagtaggcactgtatctgttgttattgctattatttgggttttaggtcaaacttcattggttgcctacgtggctaaaatgtctttttaccattcggttgtaatttataccagacacttcaagtttgatggatttttataattcttagataactgtctatagcrcacatttctgtatcataaaaatgcttaaattatatttacagtttttgtggtataatacagacatgaacattctgaagttctaattagaagtttaggcttttcttaaattccagttacagaatgccagacagaagagctaactaagtacttttcctgttttactctaaaactgaaaatgcagaccttactaatttttagaacatgtgaaatgtaataagggttagtggtcaatgtgccttttcagtaaaacaccttttaagcagaatagtttcaccatgtttttggttacctttctctcatggaaagtatattgaggatgggagtcagtagagaggagagcaggacagcggcctgggcctcagggctttcaaggattatgctatggaaccctgtaacgttatcctcttgtgacctaataatgcacatttcaccaggccttccctgtaagttcagtgaggttcaaaggagaaaacgaaatcattttgagttattcccaagacatatcactataaaaatgtattttgtttctgctctaattttgggggcagtttgaggtttggcatggctggaaatgactgtgtttcaagctgaaagtctgtcttgaagttagaatccagaccctttctaagagacttcagatttttctatacttcattccaaatatacttaggccagctttacaaatgtggtcatgacttctttatggaatttattttgtgtatttggcttttggcaaacctctctagcatgtttctgttgcctataaattaaattgctttgctgggtgctttgtctcagagctttctctggctgctccccctactgctttgtaatagtcaatgcagaacatatagtaggactttttgttgatgtattttcttctgggcaagaggggtgttataacaaatataggatcttcatagaagtggctaaatcttaagatatttccacattatgcaactacagtgtaactcaacagatataaatgttaaacttttgctaagaaggaaactaagttaattggaaaaggcatgttagttttatagagagaaaacagcctcagttgttttctacattaacatattaaatcttagattaaaaaagtgttaatatgcctaaatacaaactttaaatttcaaaagaaaatatcttctataattatagaaaatcaacatttagatgttttgagttcgatatctgctttttcatctactcaataaaggtagatttgggaaagatttatgtagcttacatgtagtaccttaaagttaatatgaaagattgagaatcctataatcactgttagaaaaaatactttctttgcttttaagtaataatggaagagggaaacaattttaaaggaaatttttctttcactgaaaagtagagcccttgatgttaccttagcataaaacttaggattaaaacaaatcttaacttgtctctgttgtcatccgttcagttcctgtgccagtatttagtgaaagtttaattattcccaacatttaattatcaaaaactcctaatttttaattattcaataaattaatcattactagataaatttctttttttcagttacattttgacttaatatttggggtagtagtggtaacttctgtctgagagcattatgaactgtctacgttttcgaaaaaaattccgaaacataaggattgcccatgataaaagaagtattttttctaatgttatgggtagattaaacaaactggtatttttctagagagaaaggatgatagataatgcttttgttcagtttaagaagatttctgcgatagttacatagactgtagctatcacttaagatataaatacatgatggatgtgcagtgctgtttatgtcattattttcagtggattcacaaaatatgtagggtttggttttctctttttcagcaggagggaccaactctttttctagaactgtagattgctggggttaattttgtgatagcgtagctctagtaggggagcagtttttacatggctatttgttgtaatagtttaattgacactgttagtctgagatctttctagaatgtagagagatcagtagcactttattttaatattcacattagttttgaaaggcatttgaagaagactttttttattccctgtaacagggattggggggtatgccttgatatttgcttaaacaacaaacaattctgctgcgtccattaggaaattagttaagttcagtgaccaactacaatgacaataggtttattatcttttactcttagagaatagtttatcttttataaagtatttattattattatttagtattcagagcttcttgtttttgttttgttatactttgtatgtgataaggatgaatgatatttactccctggcctggagtaggcaccagtgatacttacagcagctttgtacagtgaaaagaacataaatgtttttcattaggcaaacttggtttcaaattccagctctgttgtttcctatctaatattttgggcaataggccttaccgctctggagctcagttttttcatttataagtggcgataatgaaaggggaaaataaaatgaaaaagttattgagaccattagctataatgtatgtaaagctccgtttggtgcattagcacacactgggtgctcaataaattgcatgtgcttgcctgtctagaatatactaaaaaagagagattaagaaaaactctgtgtcacatatttcttgcaatgtaaaaacataatatttcttagaagaaaaacatgacttttctattctttaagaatttacagtccaaattaatgttgctcaaactttgtcatttttgagacagagtctcgctctgtcgccaggctggagtacagtgatacgatctcagctcactgcaacctccgcctcccaagttcaagcaattctcctgcctcagcctcccgagtagctggactacaggcgcatgccaccatgcccagctaatttttgtattttgagtagagatggggtttcaccatgttggccaggatggtctcgatctcttgacctcgtgatcctccctcctcggcctcccacagtgctgggattttgtcatttctgtgtacattcatatctgctattatatgttgaatgttttaacttaatgtattttttattaatctttaaaatttatttrtcaattattcttaattgacaaatattaattgtatctatttcttgggtataatgtgatttttaaaatgtgtacatcatagaaagatttagtaaagctaattaacatatctatattacctcaccaatttatctttttgtgatgagaatgtcaaaaatctattttagaaattgtaaaacatataatacgttattaattactggggtctccatgcagtgcaatagatcactaaaacttattcctccaatctaactgaaattttgtactgtttgatcgacatcttccatttctctctccctcctcctctacagcctctggtaacccacctttctactctctgtttctgagatcgacttttctagattccccataaagtgagatcatttattaaagacaatatttgtctttctgtgcctgacttatctcacttagcataatgtcctgtagttccattccatgatgttgtgaatgacagaatttctttcttttataaggctgtgtaatctttctttttttttttttttttttttttttgaggtggagtctcgctttgtagcccaggctggagtgcagtggtgtgatctcggctcactgcaagctccgcctcccaggttcatgccattctcctgcctcagcctcctgagtagctgggactacaggcgcccgctaccacgccccactaattttttgtatttttaagtagagatggggttttactatgttagccaggatggtctcgatctcctgaccttgtgatckgcccgcctcggcctcccaaagtgctgggattacagatctgagccactgcgcccggcctgtataatctatatatatatatatatatatataatatatatatatatatatatatatatatatcacattttctttatgcacacttgatgaacacttagattgcttccatatcttggctgttgtaaataaagctgaaatgaatatgggagtgcaaatatctttttgatgtaccaatttcagttcctttgggtgtatacctagaagtaggattgttggattttatggtagttctatttttagatttttgaggaaccttcatactattttcaataatggtggttctaatttacattcccaccaacagtgtagaagggctcccttttctccacatccttgccaacacttgttatcattcatctgtttgaacatagccattgtacatggtggagagcaacacatactggggtctgttggcgggtgggatgggtgcagggagagcatcaggaagaatggctagtggatgctgggcttagtgcctaggtgatgggatgatacgtgaagcaaacatggcacatgtttacctatgtaacaaacctgcacatcctgcacatcctgcacatgtacccctgaacttaaaagttgaagagaaaaaaaaggaaaatagtcattctaacaggcatgaggtgatagctcattgtggttttaattgcatttccctgagaattagagatattgttgagttttcgtttgtttttgagacagggtcttgctcttttgttcaggctggagtgcagtggcgtgatcatgtctcactgtaacctcaaattctcgggctcaatgatcctgcctcagcctcccaagtagccaggactacaggtgtgtgccaccatacctggctttttattttttcgtatagagagggtcttgctattttgcccaggcttgtctagaattcctggcctcaagtgatctcctgcctcagcctcccaaagcactgggattmcrggcatgagccactgtgcagggctggggaacattgtttttttttttttttttttttttttgtatctctgttggccattcatatttcttttttgaggaaagtgtgtctattcagatcctttgtctaattttaatcgatttgttttcttactatttggttgtttgaattttttatatattttgaatattagcctcttatcagatgtatggtttgcagatattttctcctgatccatgggttgtcttttcactctattatttggttgcttgtgcaggtactttttagtttaatgtagtcctatttgtctatttttgttttagttgcctgtgcttttggagtcctatccaagaaatcattgcccagaccattgttgtggagattttcccttatattttcttctagtagctttacagtttcaggtcttatgtttaagcctttatatctcttttgagttgatttttatatggagtgtgagataagagtacagtttctttcttctgcaggtggacatccagttttcccaacactatttgaagagactgtcctctctccattgtgtgttcttggaccctttgtcaaaaatcaattgactgtaaatacttggatttacttctgggctttctatcctgttccattggttgatgtttgtttttatgtcaataacatgctgttttgattacagtagctttataatatattttgaaatgagggaatatgatgcctgcagctttgttctttttgttcaagattgctttggctattaggtctttttttggttcatataaattttaagatttttttctctatttctgtgaaaaaaaaaagacattggaattttgaaaggaattgcattgaatcaatagaggaactgcattgaatctatagatggctttggatagtgtggacattttaacattactaattctttcagtgcatgaacatgggatatcttttcatttatttctgtcttcttcagttgtttaaatcaatgtcttgtagtttccagtgtatagatctttcaccttgttggttagatttgctcctaagttttttgttttttttttttttttgtgatggagtctcgctctgttgcccaggctagagtgcagtggcgcgatctcggcttactgcaagctccacctcccaggttcacgccgttctcctgcctcagcctcccaattagctgggactacaggcgcctgccaccacacctgcctttttttttttttgtatttttaagtagagayggggtttcactgtgttagccaggatggtctcgatctcctgacctcatgatctgcccgcctcggcctcccaaagtgctgggattacaggagtgagccaccacgcctggctgctcctaagtatttttttgatgctattgcaaatgggattattttcttaatttcttttttggataatttattgtcaaagtatagaaatgctaagagcaacttattgttaaatctaaatactcacccaagtgcctcatcttaagtaatggtatacatgaaatcataggtttgatgttcaagttatattttttctgtattttttctaaaattaatgaataacaaaatgagaaaacattcatcttgcaccaccttaaagcattttgcctaccatttactaacactgggcatacttttggacacactagtctaaatcagctgcaagaacaatttagagactaatttattgttttaaacaatcaacatttttccttctttaccctcagttggatttctccactagaggagaaaatggcaaattcgttcagcagaaatattccaattcataaaatattcattccttaggcagaatggtccgtggatttagagcaccctactatagacagcctgcctgaattggattcattctctgccttttaccaaacgtaaattgggccaygttgccttctgtgcttcagttttctcatctgttaaatagttgctgtggtgatttaatgaattaaaagatgggaattgtctcgactgagtcaggaatcatactagatactcagtagaactcattcatttccatatgtgaaggaataacattagtttttattttattattttggggggtgagggttagagaagggtgtctgccatcctgatttctatccttttgataaagtgacctaataatattgatactaaccaaagaggactattataatgttttatttactcttctcccccattaatcactttttttggtggtgttttatatgttttattcctttattttcatccttcaaggagtttgccctttgtttccttctgtaattttacagtatagctcatcaagcaagcctgagatttttgtcagaatatctgaaaatctctgagctttttctagcagaaatgcataatgcagtgcagaagaatagtctagccagtgtttttcataaatgaatgtacatacgttcttcctctgcataagactgaaagtaacccaggcacacaatatcttattaatatttaatattaagaaaagtatattaagaaggtaactctccattctacctctcaacatcttaccatctagtatacacacaaatatttccttgctctatcagccgagagggtctagaagctaccataccccagtagcaatgagcacacttagcaccctcattttggtttctaataccattctctggtaaaaggaaccaagactctttgaaaaaaaatagctgatttctagggactcaggaaggaaatatgtaagatgagcctggagcatcttgtagtgccaaaaagtaaggacctgctcaaacaaatggaaccctacacccgtgggaatatactgaagagttgcaagagcaaactgaaagagctcccaatggccaaagctagaacaatttgagcaagaaaataatatagtattggattatatcccaaagggtaaaataaatatccataaacccatattgatacaatttattaaataaatacctaagtgggggaaaatagacaaatctcctcctgtgcggaattcccaataacttctatagatactctactctcaaggagggagaacataaccccctacaccgtaagtgtgagctgtgcatattgacttccttctaaacagtacagtgtagaaagggaaaaaaaagaaactgtagtggagaawcctatcactacttcagccaggttatcaaggtcaacattgacagtgataagtgataacatgtaccctcgatatgatctgatgaaaatggcacttttaatctgtggtttccctactgaaaacatataaccccagtgtaatcatgaggcaaataccagacagatctcagttgagggatattctaccctcgaaacttgaccagtatttgaccagtactcctcaaaactgtcaaggttatcaaaaacaaggaaaacctgagatacctacagccaagaagagcctcaggagacatgaggactaaatattatgtggtatcctggatgggatccagaacagaaaaaaggaaattacgtgaaaactaaggaaatctgaatgaagtgtggactttgtttaataataatgtatcagtattggttcaataattgtgacaaatgtgccatactaaagtcagacattaaaaatgggaaacagtgtagagtatataggaattatctgtaatgtctacacaagttttctgtaaatctagatctgttctaaaacaaaaagttttatttaaaagatcgaagccatcttttaaggcctatctggaatgttacatcctttataaagcctttttttttaatcccatcttcttcccatcctatatctggggtgtcctatgtctcccacctcaggctttcctaattggatacctttgactttccacagaacttttatttgtaattctcttaactcttagtacaatattttgtgtctctgttttattgttctgatgaggtcttctacggtgtttttagcccaacccagtgagtgtctggtgccttagaccacttggccatcctgacaccctacacagtgagtgtcaatataacattttgtagttagtcacataaattagtacaagaatgcatgatgttggttaatgcaaatgctgttttttaccttgtattggtagatggagagtctgagcattctactttgtgcctttcaagaaaggtttttttctttttctttcagtgacaggaatcctgagcatttctcacttaatctcagttctgcttttagatactcatgtctcagaaattttatcatagtatatgctagatcaatctcatctcgtttaaattaaaagtttgtagtgcacaggcaaaaaccatagaggccatattcatggtcataaactgctctttctcatctctacctattttagcaataacattcttcttattagtttgttccaagtgaaaatgacataactgaatactttccctgctagtctgggaagaaaggatgtgtttgttggcttttgcctgtcagagagtattctgcaatgtttgcctagggcatgcttgcattcccatcagcatctctggtctgctgcactgtaatccctatagggacagcctctggcttttattactgacaagcagtgcactgtgcagccataggcaccataataggaaacaccttggcctgtcataaacaggtctggagagtagaaagtacaggcctgctggggatgtgtccatagcaaagaggcaaagatgcggctgccatattggagtaagtgcaggctaatgtctgccatctccatttcagaaaataactggctgattttgaagctgctttttgtataaacagtagtgttttggttgctttttgtttttggcttaaatatgaataaagccatcttaaagagattatacccttcaaagtattttgagaagatctataaagtattttccttttgttattttacatttaattctacctgatcattccaatccaaacccaatagagaaggaaaaacagatatttcactatagtgggaaattaggaaaaaaagaaccatgcaaaaatacaagtgattgtgtgtcttttaaaagaattacaaatcacactgaattacccaaaattacaaagaaaagtgcatttattattaaggtaacttgtgttgtctgtgcctttacatcaactccaagttttataaaaggagtacattctttgaccataaagactttatatttgttagtgtttttttcaatctttagggaaaaaatgaactgcaatattaatgataggctttgtagcaagaatttaggaagacaataaatttcaaaattggaagggttatcacagtttttaataaagagataaaattatttcatgagtgctttaaatatatataggtgtcattttattatttacaaggaaacccatttcacaaaagaggctaaagactgtaaagattgaacaaagctataatcctgttaaaaattaagataggtttaggaaaactaaagtcctaattttttttttttgaccactttggccagagctgttcataaattaggtaatcaatrtttgttgactagtcccctcccttgttaaaaactaaacacttgtcctcttgtatcttttttaaaaaaatatttcaagtaagtttcaacagtatgctgtgataaggatgaaacctattaacattatccttggtatatattttgattttctgttgttttcttaatcttatattgtcagtatggtttctaagatctaagatctccataagggtaagtgataattgggttttgataaatcataaggaatcttctactagaaatatgtctgtttatttattgtacatcaggaaamgattagtttactttatgccagaagataatgtttgggcctaaatcttaatttttctatctagtgttaatacagtagaatgcctaaaggatatatagaagaaaagacaaaaaaagaagatgaagagaatgcatcattacagactgaatcatcagtccctacagaaggggaatttgttctttcaaaagtagaatttcagcagccgggcgtggtgcctcaagcctgtaatcccagcactttgggaggcagaggagagcagatcacgcggtcaggagttagagactagctggccaacatggtgaaatcccgtctctcctaaaaatacaaaaattagccaggtgtgatggtgcatgtctgtaatctcagctactcgggaggctgagcaggagaatcacttgaacccaggaggcagaggttgcagtgagccaagatcgtgccactgcactccagcctgggtgacagagcaagactctgtctcaaaaaaaaaaaaaaaaaagtagaattcagctgggcatggtggctcacacctgtaatcccagcactttgggaggtcgatcacatgaggccagaagtttgagaccagcctggccaacatggcaaaacctggcctgtactaaaaatacaaaaattagccaggtgtggtggtgcatgtctgttatctcagctactcgggaggctgagcaggagaatcacttgaacccaggaggtagaggttgcagtgaatggagatggcgccactgcactccagtctgggcgactgagtgagactccatctcaaaaaaaaaaaaaaaaaaagtagaattcatgggaaaaattatttgttgctatttagccttatttttaaatatttcagtatattgtctgtttgatacatatgaacaatctgactacaactcattgggaaacaccagtatttaccttaccttctaatgtaaggcatgattccaggtattttctcatacctcaaaccttaaatctctaatttagtcccagaaacagtattctacatgtcaaaacgttttttgttttgttttgtttttggagacaagttctcaccttgtcaaccaggctggagtgcagtggcgccatcatggcttactgcagccttgatctccctggctcaagccatcctcccacctcagcctcctgagtggatggagccacaggcatgtgccaccagaccggcttttctgttttttaatttaatttaactttttttttttttttttgtagagacagggtctcactatgttacccaggctggtctcaaactcctgggctcaagtgatcctcctgccttggcctcccaaagtgcatgagccagtgcacccagcctcagaatatttttaaagatgaaaacctaatgctcagttaaacttttataagatctatgtgcttctaaataagtgtaaagatgactattttctggatgttgtattggtggggaagatggagagatagaagaacaagtgtttattctctggttgtattttctctctctctctcttttttttttttccttgagttagagtcttgcactgttgcctggactggagtgcaatggcgtgatctaggctcactgcaaccttctcctcccaggttcaagcaattctcctgcctcagcttcccaagcagctgggattacaggcgcctgccaccacgcctggctaattttttgtatttttagtagagacagggtttcactatgttggccaggctggtctcgaactcctgacctcgtaatctgcccaccttggcccgccaaagtgttgggattacaggcgtaagccactgtgcccgacctctggttgtattttcaaaatatatccaaataatattttaaaaatgtatttagtgagcactagattccaaaatagcaagagcaatttcagcaaagtataattcctagagaggaatcctacagtacctcgttttgccttttttgttctctaggtcatgtcaggatgggagcataactgacctggccctagttcctaggaggagcatgtgccctctaacatgtgcacagaaggataatagggtcagtgggatgaggagaccaagtgactaaagcagatstgagaatctgagctgtaaaggatttggaggtgggatggagggataaaaccttagtgggaagcagacagcagatagagaagatataggataaactcacggaaggtgtaagcaggttcatgattttaaaattagcctrttaagaggttgtgttggaggtctgttttcttagtgggggcaaagtggcaagggaagtttcacttctgaatagggtggaaaatgaagatataaggaaagaaagagagaaagaggaaagacgtattaggcagtgtgaggcagagaaagagaagagtgggagaaggaggggagtcagactttccttggctggaggcaaactgaccaatgcccgttgctgcccctttccaccgcagggttcatttggtgaaacctggttggactgaacctttaggagaaccttgaagtaaaaaagaaatcccagacaggtcagtggcggatgtaaatgtttaaggaagaacagacagtcagctgtagaaatggagggaggggtagagctgactggagagcgatttatggatggtatatttcatgaggcttgagtcttttttagcactaatagttggcgtcagcttcacctgttgcctccatgagtcatgccctggtagcagaggatggtgggccaactgccaagccatcccctgaaggaccggctgcctgggagtgaggaaaggtggttgatgggctctgagacagcaaggtacaaactgaaatggggtgaaaagagactgtcaaaataagtatgggctgatttgttctaatatatcataggttattattagatgctggaagagtaaaatggaatagaagatgaaaaatgtgaacctttatcttgattccattttaaatctcctaaattctgaggagctttgcaattcctcttctggatataaatctgccctacagtagagttgcaaccttggataaataaataaatttggcctccctgagcctctgttttccctgtaaatcaggactaacataatctacctcaaaggattgtgttgaaaattaagtgaaaacttacataaattatgtagtgtggtggggacatatgataggtactgtggcctatccttaggagggatgaggaatggaactatttttaaacataaaaggtcaactttatatgctgccatataagtaacccagtgcaattggagcttgaatcaacagggctgggagaaagcttacagagtgtgcctttgaaatcccaatacccagtcatggtgatttatgagaccttaccagcttgcatatgtgatggcccactgagtttgtttactttagttttagctcagttacccagcactctatgatagcctattttttatttacactctcactaactcctttattatgatttctttgaaagaatatgaagacagccataaaaaagactcttattgaagttgagagggtctcctgtaggtcttcacttcactgtgtctaaacattggtctgttgcttgtgctttgcttttctctcaccctggatgaccttcaaggctcttccaaatgatttctctgattccctgaaatactgaaattgtgattaacagaagtttcaagtgttaatcaatatcaagatagtagttgtctcttcctggggaaactagaaatgaaaaccaaacataggcctctgtaatcattgcacagattaaaaatgaaaatgcagctgagaaacagaggaatgaatgagaaaaccctaaacctagttctagccccaggatgaggtctttgtcatgagtctgacgctagccacagccggtaagagaaggaattccctagtagtgtagttgttacaagggaatgagtcattttgcaggtaattgttcttcttccattttccacttgctgtcagccactttacagaggagtcggactttgttctgcttaagagaagtctctttccttttattgtttaaaaaaaaaaaaaaattccagaagcccttagaaagagatttgtgagatcaactggtttaccttcttcattcagatgaagtaacaaagcacagaaaagttattttgtcaaggtttctgtcttgtagcaaatacaaactttctggtgttaaacatatgaccctgatttgggtctttactgacatcatcacttttttttttttaattttctgagacggagtcttgctctgttgcccaagctggagtgcagtagcacaatctcggctcactgccacctccacctcctggattcaagtgattctcctgcctcagcctcctgagtagtgggtataacaggtgcatgaccacgcccagctgttttttgtgtttttagtagagatggggtttcaccatgttggccaggctggtctcaaactcctggcctcaagtgatctgcccacctcagctttccaaagtgctgggattacaggtgtgagtcaccacacccggccaacatcatcacttttgaatgaaatttttagtttggtgatgactttattatttgtatttgatccttgtccatttttctctagatctggtactaatttcatgtggaaaataaatcgttaggaggttttcattttgtacgttttggctgcaaacaaccacaacccagtctttaggttttcactgagggatttttgttttagcccaattattgtatgacatgtatctgctccagaggttcttataggtgaaatgagatttttatgtatctgtattcaaacacatagatagatagatagatagatagatagatagatagatagcgaaacatatagacatacctctgaaaatacaaccagccatataatgtaagcctgttgtgtgttaatgaatgatagggtaataatacattatgttcctgtcctgtagaggagttcgagtattcaatacagaggaccagaatgattggtcccagaaaaagtgctccttaagctggatcttgaatactgaggatttatataggcatctaatagggaagaggtggtattccaggggctggataaggcagggtaggatggggtattcatgtggattcgctttattgtatgtttgctggagaggagggtagtgggcattctggaggagtgagcctctctggaacagaggatgtgattataggaccagtggcaggtgtgagaaatgtagattgaggccatactgcagactgtcttaaatgccaggtcaagccatttgcacattgtcctataattcatgaagaacccttacatttgactataaggaaaatattatgaagaaactaaaataaggtgactttagaaggttatatctggtggtagtgtgcaggatagattatatcaaggggaaattgtactgaaagcaagaagaaaccgttaggraattaggtgtaagagtgataagggcctgaaataggatagtgatgaaaagagaggaatgagtaggagaaagattgcacagagaagggtgacagcatacataagacttggcaggaccacagccagaagaaagcatgaaattctaaacctgaataatggacagaattatagttggaaaatcatgaagagaagccagttgggtattgggggagggctggacaatatgacagttaagtttttagacatataatttaggtaaggctatgtatctaagcggaaatgccctataagctttcagttgtcaggactggatttctggttaaaaaaaaaaaaaaaaagagggggcaggattttacttgggtgttgtctgcaaagttgatagctaagaccttaaggctcatctgtgaaacgggagtgacagtgctcattaaaggttattattagaaataaatgaagtaattccaggagagtacataggactctccttgacacatagtagaccctcaataaacattaggttttattattgtttattatgggttttagggaacaacacttttgtgaattattagaaccttatttgggaagctataaaagccatctgcgtgatgtgttttcttagtacaccaaatggaagttcatatgttccattcatatacatgcttccctagctgttaggggaaggtgatagcgcatgtttaactgttgatcactgtttgtaaggcttttcgtgttttttacatatttggttaaggatcttaatccttgagctgtattttgttctcatttgtttgtgtccagagtcaaattaagtttaaggaatttataaagagcttctttgcaagaatgatattaactcaatgtactaaagctacattcacccaaagtgtaatagacttacacaacatggaagaaatccaggagaggcagacagttattcatgaagagtggtagtattcctgtctgcctgtctgtacatttgtcagatcagtgcattctgagaaaattatgccaatttgaaatctccaaaagcattctcagccagtatccgtgattctgatagtttacaaactgttgatagcataagctgttaggaagatattgtagaaattttaatgcagctgttttaattagattgctttccttataacaagtttcagtgtttctggtcacaatacaatttattagctcctgacacatgacactgctggatcaccaaccttaactctgattctctccatacaacccagtatccttaagtaaaatgctgcatatttcattgctggtaagagaggcagggccaagattcgaactcacatgaagccaactagagaagcctatgctctacactattttacatctcataattctcatacactactaacctgttgcaaatgaaaaagaagtcttattattgtaccacttttaattgcacttattattgccttcagtaaagtcttcatttctaaaatgtcttagtaaaacagtaatttcataaaaatattgccaactaggagtactaaattctaattttggttatattatgcggccttggataaggaagtttcttaggctttcatattccaaattattggactattctaaaaacatttttaagtattttgatggatgtagtctattctaatataatgtctttcaagtgtttgaaagttactacttattcaaaactcaactgtctggcagcttttcttatcctgaactctgtgaagaacttcggggacaggaggtaaaatgtctttgaagagtaagaaatccaaaacttcatgtatttacatgttctggtcttgtctcataggattcttctttctccttacataccctcctttaaatccgtacctcccccggtcttctccatcttgcaaatggcaccaatgtccatcctagacattgatcatcccagaagtctaggagttgattcttctcatttcttcagttctgttgtgcaagtcttcaagtcttgtcagttttgcctcaagcacttttacaaactatcctctacagagacagctttacaaaatgtaaatcacatcctatcattccctgctcagaaccttctaatggtatcctcacaccctctggaaggctcataccctcaggacccacgtgatgttgccttgacttgcctcggctctcattccgtagacctgtcctccctcagactggctgtgttactcagcctttgttgagagtgctgtgccccaaatctggttggcttattctaggcattcgagtctcttcccaaataccaccttctcaagtgcagcttttccttactacttaattttatagtcccccatcaatgtacgatgttaccctcttttccttcattgagagtgtttgtaatttttttttgtctgcttrtttattgtctttttgccccataagtccaaggtttacatgaacagggaacttgtctgttttgtttattactgtatcccctatgctggcacatactatgtaataagtgtttgttgagtgcatgagtgaataaccattctaaaaaactctgatgtttaaagccctttgctttatataagaattttacttggaaccctggtattttygtttgtatttgtttgttaataaatgtcaagagttcagtagtaagataggtttcagaaatgctaagttaaacagaataaagaaagaatatgtattacaggtcctggcagagccttgaatatgctaacatttgacagtgggagtctttgagaattatcacatgaagctgctgtacattacaacacattctaggaaatgctgtcttagacaaaaacctgtcatattagaattggggtaaggggcacgatactgaccgtgaggcagcagattcctatggactacattaaaaaaaaaaaaaaaaaaaaagaacagactgataatctagggctcagaaaaaaaaaaaaactgtgatatgaaacagtggcaaaaggattcaaaaagaatacagcggttgggactatctacttttttaatttttttattacactttaagttctagggtacatgtgcacaatgtgcaggtttgttacatatgtatacatgtgccatgttggtgtgctgcacccattaactcgtcatttacattaggtatatctcctaatgctatccctcccactcccctcaccccacaacaggccccagtgtgtgatgttcccccatcctgtgtccaagtgttctcattgttcaattcccacctatgagtgagaacatgcggtgtttggttttctgtccttgcaacagtttgctcagaatgatggcttccagtttcatccatgtccctacaaaggacatgatgaactcatccttttttatggctgcatagtattccatggtgtgtatgtgccacattttcttaatccagtctatcattggtggacatttgggttggttccaagtctttgctatcctgaatagtgctgcagtaaacatacatgtgaatgtgtctttatagcagcatgatttataatcctttggatatatatccagtaatgggatggctgggtcaaatggtatttctagttctagacctttgaggaattgccacactgtcttccacaatggttgaactactttacagtcccaccaacagtgtaaaagtgttcctatttcttcacatcctctccagcacctgttgtttcctgactttttaatgattgccattctaactggtgtgagatggtatctcattgtggttttgatttgcatttctctgatggccagtcatgatgagcattttttcacgtgtctgttggctgcataaatgtcttcttttgagaagtgtctgttcatatacttcacccactttttgatggggttgtttgattttttcttgtaaatttgtttaagttctttgtagattctggatattagccctttgtcagatggatagatagcaaaaattttctcccattctgtaggttgcctgttcactctgatggtagtttcttttgctgtgcagaagctctttagtttaattagatcccatttgtcaattttggctcttgttgccattgcttttggtgtttcagacatgaagtccttgcccatgcctatgtcctgaatggtattgcttaggttttcttctagggtttttatggttttaggactaacatgtaagtctttaatccgtcttgaattaatttttgtataaagtgtaaggaagggatccagtttcagctttctacatatggctagccagttttcccagcaccatttattaaatagggaatcctttccccatttcttgtttttgtcaggtttgtcaaagatcagatggttgtagacatgtggtattatttctgagggctctattctgttccattggcctatatctctgttcttgtaccagtaccatgctattttggttactgtagccttgtagtatagtttgaagtcaggtagcatgatgcctccagctttgttctttttgcttaggattgtcttggcaatgcgggctcttttttggttccatatgaactttaaagtagtttttccaattctgtgaagaaagtcattggtagattgatggggatggcattgaatctataaattaccttgggcagtatggccattttcatgatattgattcttcctatctataagctttgtgtcctcttttattttgttgagcagtggtttgtaattctccctgaaaaggtccttcacatcccttgtaagttggattccttggtattttattctctttgaagtaattgtgaatgggtgttcactcatgatttggctgtttgtctgttattggtgtataggaatgcttgtgatttttgcacattggttttgtatcttgagactttgctgaagttgtttatcagcttaaggagattttgggctgagatgatggggttttctaaatatataatcatgtcatctgcaaacagggacaatttgacttcctcttttcctaattgaataccctttgtttctttctcctgcctgattgccctggccagaactttcaacactatgttgaataggagcggtgagagaaggcatccctgtcttgtgccagtgttcaaagggaatgcttccagtttttgcccattcagtatgatattgrctgtgggtttgtcataaatagctcttactattttgagatacatcccatcaataccgaatttattgagagtttttagcatgaagtcctgttgaattttgtcaaaggccttttctgcatctattgagataatcatgtggtttttgtctttggttctgtttatatgatggattacgtttattgatttgcatatgttgaagcagccttgcatcccagggatgaagcccacttgattagggtggacaagctttttgatgtgctgctggatttggtttgccagtattttattaaggatttttgcatcgatgttcatcatggatgttggtctaaaattctcttttttttgttgtgtctccgccaggcattggtatcaggatgatgctggcctcatcaaatgagttagggaggattccctctttttctattgattggaatagtttcagaaggaatgttaccaactcctctttgtacctctggtagaattcagctgtgaatctgtctggtcctggactttttttggttggtaggctcttaattattgccttaatttcagaacctgttattggtctattcagggattcaacttcttcctgatttagtcttgggagggtgcatgtgtccaggaatttatccatttcttctagattttctagtttatttgtgtagaggtgttattctctgatggtagtttgtatctctgggggattggtggtggtatcccctttatcattttttattgcatctatttgattcttctctcatttcttctttattagtcttgctagtggtctatcaattttgttgatcttttcaaaaaaccagctcctggactcattgatttttttgaaggtttttttgtgtctctatctccttcagttctgctctgatcttagttatttcttgccttctgctagcttttgaatgtatttgctcttgcttttctagttcgtttaattgtgatgttagggtgtcaattttagatctttcctgctttctcttgtgggcacttagtgctataaatttccctctacacactgctttagaatgtgtcacagagattctagtatgttgtgtctttgttctcakyggtttcaaagaacatctttatttctgccttcatcgcattatgtacccagtagtsattcaggagcaggttgttcagtttccatgtagttgagtggttttgaatgagtttcttaatcccaacttctactttgcactgtggtctgagagaaaatttgttataatttctgttctattacatttgctgaggagtgctttacttccaactatgtggtcagttttggaataactgtgatgtggtgctgagaagaatgtatgttctgttgatttggggtggagagttctgtagatgtctattaggtccgcttgttgcagagctgagttcaattcctggatatccttgttaattttctgtctcgttgatctgtctaatgttgacagtggggtgttaaagtctcccattattattgtgtagaagtctaagtctcttagtaggtctctaaggacttgctttatgaatctgggtgctcctgtattgggtgcatatatatttaggatagttagctcttcttgttgaattgatccctttaccattttgtaatggccttctttgtctcttctgatctttgttggtttaaagtctgttttatcagagactaggattgcaacccctgcttttttttgttttctatttgcttggtagatcttcctccatccctttattttgagcctatgtgtctctctgcatgtgagatgggtctcctgaatacagcgcactgatgggtcttgactctttatccaatttgctagtctgtgttttttaattggaacatttagcccatttacatataaggttaatattgttatgtgggaatttgatcctgtctttatgatgttagctggttattttgcccattagttgatgcagtttcttcctagccttgatggtctttacaatttggcatgtttttgcagtagctggtactggttgttcctttccatgtttagtgcttccttcaggagctcttgtaaggcaggcctggtggtgacaaaatctcagcatttgcttgtctgtaaaggattttatttctccttcacctgtgaagcttagtttggctgggtatgaaattctgagttgaaaattctttyctttaagaatgttgaatattggcccccactctcttctggcttatagagtttctgctgagagatcagctgtaagtctgatgggcttccctttgtgggtaacccgacctttctctctggctgcccttaacattttttccttcatttcaactttggtgaatctgacaattatgtgtcttggagttgctcttcttgaggagtatcttcgtggcattctctgtatttctggaatttgaatgttggcctgccttgctaggttggggaatttctcctggataatatcctgcagagtgttttccaacttggttccattctcccatcactttcaggtacaccaatcagatgtagatttggtcttttcacatagtcccatatttcttggaggctttgttcatttatttttactcttttttctctaaacttctcttcttgcttcatttcattcatttcattcatttcatcttcaatcactgataccctttcttccagttgatggaattggctactgaaacttgtgaatgcatcatgtagttctcatgccatggttttcagctccatcaggtcatttaaggtcttctctatgctggttattctagttagccatttgtctaatcttttttcaaggtttttagcttctttgcgatgggtttgaacatcctcctttagctcggaaaagtttattacccatcgtctgaagccttcttctctcagcttgtcaaagtcattctctgtccagctttgttccgttgctggtgaggagctgcattcctttggaggagaagaggagctctgatttttagaactttcagcttttctgctctggtttctccccatctttgtggttttatctacctttggtctttgatgatggtgacgtacatatggggttttggtgtggatgccctttctgtttgttagttttccttctaacagtcaggaccctcagctgtgggtctgttcgagtttgctggaggtccactccagaccctgtttgcctgggtatcaccagcagaggctgccgaaccgcaaatattgcagaacggcaaatgtagctacctgatccttcctctggaagcttcatctcagaggggcatctggctgtatgaggtgtcagttggcccctactgggaggtgcctcccagttaggctactcgggggtcagggacccgcttgaggaagcagtgtgtccattctcagatctcaaacttcatgctgggagatccactactcttttcaaagctcagttggaaatgcagaaatcacccgtcttctgcatcactcatgctgggagcagtagactggagctgttcctatttggccatcttggaacctcccccagctatacctactttattggatttttgtgtctccatcagctgacatggtacttacagcctagaatgagcatacaaaggatactcattcgctattcgatgatgactgacaaacagtctcccaggatcaccatgaaataactaaactgagtttgatttatttaaaaatcaggtccaggtaacaaactgcacctgtccccttgaattgatacaaataaaaataaaacaaaaaaggacaatattttactttatggaactttttattacaaagaattaaaaaaaaataaaataataatacttaaaagaatactttgactattattttatcacctaaaggcttctcttattattttatttttggagacagaatctctgtcaccccggctggagtgcagtggcgcgatctcagctcactgcaacttctgcctcccgggctcaagcaattctcctgcctcagcctcccgagtagctgggattacatgagtgcaccaccacaccctgctaattttttgtatttttagtagagacagggtttcaccatattgccgaggctgatctcaaactcctgagctcaggcaatctgcctgcctcggcctcctaaagtgctaggattacaggcatgagccacagcgccctgccaacctaaaggcttttcacaactgggaattcactgaatgttgtatcattaaagctaatgtggaccttggataactgtatgcctrttttctgggaaataatggtggagctctttgaaagggtaaaaatggtgttttatcatacataactatgcctgaggtttttgttttgcatttatctttgggcaaagttgtaaagttaagcaaatctggaattgaaataatttgataacatcagctaatatttttcaaagttagatttttgaggtataatttacataagagttactctttctagaggtatagttgaatgcattttcacaaatgtgtacaattggataaccaccaccataatctagatatataggtaatgtgtaattataatatatatgtactatataatataggatatttataccacccaaaaagttttctcttgctttttatagtcattccccaaaccccacgtccagtgctgattgtccctatggttttgccttgccagaatgaataatacattaaagatatagccttttgtgaatggcttctttcacttacaatacttttgagttttgagttgaattataagtttcacttataatacattttgtgttattgcatctattggtaatttgtttcattttattgctttttagtatttcatttttttccagtatgtcattttatggacacaatttgtttacccattcaccagttgactgatatctgaactgtttctgggtttctgctatagagagttgctataaacattttcatataggtctttatatagacatatgttttcatttctcatgggtagatacttagaagtaggattgctgggtcatatggtcactctactttttaactttataagaaactgtcaaacctttttccaaagtttctataccattttgcattctcactagcaatgtatgagaatttaatttgctctgcatccaggccagcattttgtattgtttgtattttgtattttatacattctagtaagtatgtagtgtggcatctcactgtggttttactttttgtttccctaatgtctaatgatggtcrtggatcttttcacatgcttattgatctttttgattcttatgaagtgtttgtttgttcaaatcttttgaccatcttttcactggattgtcctcttattgtgttgtaaagattttttaaaaaataatttctggatacaagtcctttatttgatatgcattttgtacatattcccttctcaagtctgtggcttgttgttctgttttcttaacagtttttttcaaagagaaatttggtaaagtccagtataccatttttcattttatgcttcatgcttttgtggtttaagaaatctttgcctaacgcaagatcacaactactttctactgtgttttcttctagaagttctttagttttagattttacatttagttctatgattcatttcaagtagatgttagtgtggtgcaggataaaggttgaagtttcttgttttatgagtggatgctcaattgttcaagcattctttgttgaaaagaatatcatttctcttttatagctcaaattttattacttaaaattattttaagatgcacatattaaagtgatatgtgtaaaagattatatatttctggaagcatgcctatttacactagttattattactttaggagacagatattctctttgtttaaattgtttccacaaagcataccacgaagtacagaggggacattagtaactattttatgatgattatggtattcatttaggccaatttaagtgaattggagatcctaattttctctataaggagacaatactttttcatacaagattatttttgtggaggcttcatttatgtgaagtttttgcacccatttattgtcatgattattcttcagtgaaacaaaagtctgtagtagatatgctgctgctgctggttttaggtaaattgactaaatagttatacaaaactctgtctctaccatatatgaattcaaactgtatcaacaattacagaatactatgctaacatctaataagagagttagcccatgtagaagagaaatataaatacagctatcagatcagtctcatgttatttcagcttcaaggagcctcttagcaaaaatggtttcctttctccatacatgttgcaggtgtttactattttaaatgagacttttttgttaaaaaaaaattaaaataagatcatttagagaacgattctcagcttgttcagatgattatttggttttaaaaaagcagcctggagttcctcttaatctcaaatctccataaaacttacaagagatgttttcatttactgaaaggaatagttttttcttaatcaaatgtagagccattatcactagagggcagtaaatacaaacagatttagtggatttactggcactaacgatgttttcagaatactagcattaatcaaagaaagtatagtttttataatatgaaaatacatgtaacattctgttatgtaaaatattggttatgaatcaattctagattattgtctgcctctaaaatatttttaaggcatttgaaagcaaagggaggctgagaaacactagttttctgtggctattctgtttaatacttgaagtttaactttgcctcagaattcttcaagggacatttaaaaattagatttgcatttgttcaagctgaacagtactggatatatgagagaccacgttatatagatttgcttcttgattaataactaccacgacttttaattttaaggtgaaaggtgtaaaataaatgtagattgattataggataaaatattttccaataatgtaagtcctactgcaaacagtgctactgcctggaaaactccttatgttggagaggtccaagagctaatacacttattttaaacaatatttcttaaatatttcaaacacagtaatataatatacagcttagaattgattatattaacggatctattatgtaggctctaggctaaatataaaataatgcctgaaatagttttctttttttggcaatttagagtactctgaaaccagacagtctgggttcaaatcctggccctgttacttactactggctttgtgaccttgagcaagacaacttgacctctctgagccttagtttccccataatttagttttgtttttccctattcaaaaatgcatcttttctctcttgacctctgttacaaagtcaataatgacagcatgtgttaatgtatcagcagttcagctccatcagcagaatttcaaatatcctgaaatgtactgaaatagttcaaaaagattgttaattgcttgggtatctggtaaggactgagaaaacaaggaatagcagggaagtggcctctagaaattctgaggggtatttctaggaaaagtctgaaaaagagaactaactgaacattatgggaattttttttttcttttttgagacaaggtcttgctctgtcatccaggctggagtacagtggtgcaatcatagctcactgcagccttaaactcctggcctcaagccatcctcccacctcagcacctcccacctcccacctcagtagtatctggaactacaagcacatgccaccacacctggctaatttttaaattttttgtagagacggtggtttctctatgttgcccaggctggtctcgacctcctggcctcaagcaatcctcccgcattggcctcccaaaatgttgggattacaggcatgaggcacttcaccaggccaagaaactattttttctatttcaacaaacacacttgcatatatgtatataaaatcatttgggcatttgagagcagtggattacagataagaaacctgagctctagctgtaacgctgtccctcaagttgtgttgtcagaacttttctggacctcagttccttgtctgaatgtgtcgtcatcattacatctgcatatgagggcagctgtgtgttgttcacatagcgctcccaaacataagcgtgtctcactatatggcagggctgtctgcctgtgggcacctgcttcctcaccctgtccagagatctgaccatggtgatagtaaccatgattctttaattcaaggcactgtaaagttagcaaaaagattgaggataaacaaatccactcctagattcatactgtttatcatagagtttgcatcagcctaattatatgatgagctgtcatacaccattaagagcaaggactgggtttgcatttcaatcctgtcacctatggagcaagttattgaatatgtaagaaggtccatcttttcatgttaaaatagggataatatttatcttatcagaatgttgccaagattagaaatgaggtatgtaaagttctttgtgcatagtaggtgcctagtaaatgttgtaacttattaaagtttcttcattaaatttggtgaagccaagtctgactataagaattgtatctctctggctctattcaaatttctcttctaaattatctagattctctctgcagatagcagctaccgtggcaataggaaggagattctagtctcctagaaatggagattagggaaaatgaaatgaattttaatttggctcagagatttttgaaaagatttcttattccctagaaatatggaaactttccttggtactttttactcaatatgattaaataatctcccttattgcagcaaattagggacttatttgaataagttaaatcctttcacatccagcacctattagaatgcctggcacataatagttgccaaatagaagtctgttgaatgaagggaccatcactcacattcagcagggagaagaggctgcagattttagagggaagggaaactgtatgtgtgtttctgcataatgttttaagacaaggagtattatctactatatgtaatctgttttaaatgtttttgatgattttgctgagggtgaaaacccttgtcctttcctgtcacctataatcagtataaaaatattgatgttttgcatctgcatcagccaacaatctttttgtggcaatagtacactaccttgagaaatacagggacataataagatacttttctggcctcaaagatcctccaccctggatgaggagtcaaagttgaagacagttgaaaaaaatagaacagtgattcttaacactggggaacattcaggaaatttcaggggacagtgactggggagtactcctggtgcttggtgggcagaggccagggaggctagatgtcctgggatacatgggacagcctttcaccagggaggtttgctgtgtgtcccacacaacttccaaaaagtcccagcagctattcacataggtgaaaaaacaaaatgcatttataattctctgagcctagaacccaactactttttacgtataagtattaaatatttttacatggttttaatccacaccaaattttctagtaatgcagcaatagtgtatattgtgaagatggcactttgttacatttgaaacctttcaaagaatcattcatcatatcaggaaaaaggaaaatttttctaacataacacccctgtattcattttcatgctactgttacttttgtggtaattctccccataagagaaatcatagcaaacccttagatagcacttactgttctaagagccttatgtatatgcactaatttaatcctcacaacaaccctgtaaggtagaaactattattctcattttccatgtgagtaaactgaagtatgggaaatttaaatagcttccccaaggtcacacagctaatcagttatagtagtttttgactactttttaaaatgtagttgtgtacaagtatttatattttgtagtatttgatagaaattactcatttctcctttatttcactgataagccattatactgattttttttttaaatctatgtagggagtatttagcctatatgtattcagtacagtattatgaaggaagtgtatttaggaatttcatttcaggatgaatacttgttataaaaagtaaaaagtaactgagtcttaagtttgtcaaagaataaaattgatggatggatggatttttttttttttaaaggagggggaaggcagtgagcctgactgcagagtgtaatttgcatttaaatgacaagtggtatgacacttccacctgttcttcagggagcctcaccaagtatgttttgcctcgaggcctttgcttttgccattcctcacttggttttcccttctctaccctacctctcaccccgcaatccacatggcttgtttcctttcttcagatctcctggtatacgtcatctcatcagaggggctttccatgatcaccttatagcaacctctatccgtaatccttatcccttctttctctccattgtgcttatcaccccatgacgtattatgtatttattaacttagttttggaatataagctgcaggtgagaaagctttgtttctctttctcaggcagtgcctgacatagagtaggagcttaataaatattgaatgaaggggcagatgtagaatcgttagaatttggaaaaaggctggaatatttggtcctaagatgtactttgaatgatttaaatctgactgagaaaaccagtttgaggttggcagagtagaagaaggagggtattttaggccgagaatttggtaagacagagatgggattgtcagctgtatggtgaaggtggaggartactagtctttcaggaacagagcaaatgtaatagagcagctgaaaataggcttggcgttggggattaaggtcagatatggcagtctggaatttacagagggatgtgatgaagcaggcattactagctttgaagtaacaggctgcggctggatttgaggaaaattgatctggcagtagaggtcaatatgagactagaaggggaaaagccaggggcaagaagatgagctaagaagcaattacagcattttggccctgagacatggagtgctgtgatgcaattgaaaggaaatataacatatatattttaaaaacaaatgacaaaccagagaatttttttaaatattagtataatagaatgattatcataatgatcattgtcactgtcatctttactgtctgatacctacttatcttcaactttgtaccatttgttgttttaagtgctttgcatatatggtctcatttaatcctcatatgtatctgttctggttatttattgctatgtaagaaatcacttcaaacctaatactttgaaatatgaatgtatttttattagttttcatggctttgtgggttaactggtcttggctagacattcttgcttggcattcctcatatggttgcagcccagtgggtagctatctgaaagctgaactggctggatggctaggatggcttcttgcccctcaggtctggctctgggctggggtggctggcattgctgaagactggccaggcatgtgtgctctttcttgtgcaagtgctctcttgcgctttctctcttcactgtctgtgaagttaacatggacttcttgtagcatagcctctcagagtagtcagacctttttttttttcaacctaatggcttaggggtcccaatagcacattcaaagaaagcaggatgagagctgcaagatttcttatgacttagcctcagcagtcatgcaccatcacttgttggttacacaagccaactcagattcagtgtaggacagtgtggctcattaagagtatctttggagactagctgccacagtaatccactttacagatgaggaagctgacacactaaaaagattatttgtcagtgattgtgcacaaaagatttaaacttgcaattcttgttctcagtaccagagtgaacctgggaaaatcattttttctctctaggtctcaactttatgtggaaatgagggagttagagggggtgatattaaagttactttctatttctctcagtcttttaaatatttggattcagattacgggaggggtaatggtaaggaayaaactgaaagaaacagctctggataaaagatagggcttgctaacaaagttgaatgaaggagggaaggtgatgccgtataggggaacatgccgggttactcaaggattcagctagatggtttatattaaacacctgacagtgtctgacgcacatgaaacacctgttgaatggtaggaaagagtcatagattccatctgagatactggaagaaatataggctcactgactgaaatggaagtaattatactaagaactactttaaatagaaaaatgtctcacagttttgaaaaagtttgtcgtgactagcagggcattcgagaggagaatcttgtattcagaaatatggcactgaagttcaagttagaagtggtcattgaagattgtgggcctagggaaaattaaagaagttcaggatcctgggagttgagggagagtagtaggaatgatcaaacatgtggaacacttcagagaagtagggagaccagagaaaaggaggaccttagtattcctctgggggtagctttagtggaatgttggagctttaatttcttccttttgtagaggagtaagagtgatggaaatgaatacaacagatgttaacaaaagcagaggactgtagcagctaaaggccaatagaaactcagagagacacagtgttacaggagtgcttatcagagagcatgctctctaagacagacatgccacatgtggaaatagttaaatgtcaggaagactgcagagtagccataccagcaagttaaagcacagagtagtaagcacaggctttgagatggagaggaggtaaaatgcacagaattatatgctaaaatcaactaaaacctagtttttccttgtttctcacccacaagacctctttagtattaaagttacagggtaatactacaccaaaccaaatagaaaatgctgtttttctagaaagaactttgatttctcatttaaccctcctcgtaaaatgtctgattactcttgagctcaattctggattcctaagagccactcattcctttcttaactttgtgtacagttattaaaatgttctgttctggctgggcacgttggctcacacctgtaatcccagcactttgggaggctgaggtgggcagatcccctgaggtcaggagtttgagaccagcctggccaacatggtgaaatcccgtctctgctaaaaatacaaaaattagccaggcgtggtggtgggcgcctgtaatcccagcttctcgggaggctgaggcaggagaatcgcttgaacccgggaggcagaggtgacagtgagccaagatcgcactactgcactctagcctgggcgacassgagactctgtctctaaataaataaataaaatattctcttctgatcaaaatacagatcctgagttctatatacaaaacactgcattccttatgcatacacagtgccctagctttcacatttccctccccccagaattgcaagtggtcccacccctagattttgaaggttttagaactctgtcatacataacaatagaaacaaaaggagctgagagcagccatgscacacaggtgagggaatgtgtcattgccatctgtgccatctgtgaattctggacattagtcgtattgtttaatccctatgcttttatgttggatgaggggagaactacagtcatttctacatcaccagggagccacttgttttggatttgagagagggaagcaattaaaatgctcgattgccatttttggagcagtttttatttggaaggaagggaagccagaggacattaaaattcatagaaaatgccctccaaaaggatgggcaattcttaagaatgaactacgaattttgaggagttttatggtcattattcatcactgcaagagggaagccccgttcatcttttctcagggtggcctcagagctgcagggataccattattcaatggcgtttgtcgggtgaggagaaagcctccccagaggctggcccttgccaaccaatcccaaagcagcctgcaccgaggccacaccccctcgccttataggctaagagctggaatgcaattggtgcagagttggggttttatgggaggggcttcttgtcactcttcccggcttccctgcagttccttatttggtagcttttgacaggactagcctttcttgcaactaagcatcttgacatacattattcattaagccctggagctcgggagagaaagatgcagacccttagatctttagatattcctttatcacgtggattttctttattcagaatagttgctgaattttgtgccattctggagtcttacaaatggcatgtattcgatgggaagacggctggatgggatttaatgcgaggctttcttatgtatacttaattaccaaaaatctttaaaaactcatactctgcgtggcttgtggaggttgttaaagtgtcgagattttgaagctaaatacattttagagctkwctatatatatacatatatatatatatatacatataatcaatcaaaaatgcctgaagcaaactatttactgtcagtgtcttggggctacataaaggtaagacttacttagcttttgaaaactccttactctgattacaaaattatttagaaagcttagactctactgtaatttgttcaaactatcagttatgtattctttccttacacatgaactaggaagaaatacgtgttaatagtggtcaagataagattgtataactttcatcagttgtagtttgagtgttaaaatagctkttttagatacgcagtagttcttctgtttgtcatgtggtatatgtttgaattgtgcttgaaaaatatatggtaattaaatacattcattgcaaataaattattgggccaaattacttatactgatttatggattccagttagtatgttgcacataaagtttataaaattaatttgtggctgtttctaaaaatctatactactttaacctgacgaggaatacgtttttttcacctttagctataaagccctaggtgacattaaaaattgacattacttaactatgtaagtgatactaaagtgaaaacttgattgtctattatacttgcaaaactgaacaaagtttttattacactgttttgtgaatctcaagaaatgaattaataaacaattcaataagattgtgtccatgcttggcaggctttttccatgccctgtggtaacattagcattgtgatcctgtctccacaatagaaggaggtagaaaaaccttattcagtcctaaatgaaacatcacttcacagatttttggtatttgagccactcgcttgaacctgggagccaatcacaacacattttaaaagattcattttctgttactctgaggatttttcagattggagtgtttgtcgtttgctttgtttctttctttttgaaggacaagttcccctttgttttagagatttacttgaattctaaaaaaattagaaaacttatttcagtcttggttrtccaagtagtcatgattccttacctccctttaaatctgtggatgattcagatttttaaaaatgtttttaaaatatatagacttccattatttgaattttgttagccatwtcttggctaaaaatcttcagaaatgcagaaaagtatagagagtaaatataagawgccctcattatccgccagaattcagctcctagcttttagccagctcacaactgatgttatttttgaagsgcttcacatttgtactgtgattatgaaccatttgtactatgattatgaacaatattgccaagaatctacatatagaattttagtacgtttctttttgaggaaaatttttcctggacagctttatgtttaatactgtacctttaaaaacatgtaaaaatagcaaatatagatatatttggtcttatgcattttgaaggttttatttttataccatcaatggagtatttgtttaaataactttgaatactgatatctaccaaacttgtaatgcatcacagtgcagcatattcaaatgatttttagcagaatattgtcaggaaaaaataagaaaattttcttactattggacccataccacctccttaaatatatattgggaggatatataatatacccagtagcacactggcgtgatgtagaagtaaaggagattacatttaaggacattttgttttattattttagtttgcttcctgaacaatcttaaatgcctaatgtaaattgaagaattgcagttctgaaaagcaaaatacagtattgagattcaactgcatttttactttcctttatgccttaactgctgtacacagacattctgatgtataatgagaacaaaggattcaaaagcattcacttagaaatcctcccctgtttttttagttgcaaccctaaatctgtgtattgttttcagactacttaggccaaaaacaattagaaattcatcaatggaaaatatttagaggtcacttaaaaaaataaactaaatgcttaaatggttctgcattttacaatcggttcgtttcaaacagcagtttaatgttttgtcccttctaaatatattaattgagaaatatgatgggatttcccagaagaatacattgtattagctttaaatcagtccttccccctttggtaattttatgtagttatcttagtaaatattatataattatttttagatgagagaagtatcacatttttaaatgtttgttgaatgatctagtgcatttttttagtacatctagctatgcactccaaaaccaatttgtgagatcaactaccagttgagaaagcacttatggtaatttttgtggttattcatttagctttgctggactgaaacttttatatggatagcaaaaaaggaaaacaatgttaattccttttagaaaatacccttgtgttataacttaatgtacgcttcagaattatctttaggaaattccttagaccgtcttcctagagtagagaagtaattgcttcaaatattgtcttttataattatgttaaaatgaaatgttgacttccttggagtcccttataagccttggtagggaggtgggcatgtgatggaggatttctccaatccatgtttttgtgttttaaacaaaggctggaaagtactctgggaataatgtatatgaccagaaagatgaacatgcaggatgtcacttatctagtctgtacaatatttagattcctttcactggcttttttcttcagttatctgtactaactggctattttggtgaattgtttaagcaaactgccaggaaaattatacttcgttctttatattcttttagaaaaatccaataatatatgtagcatatctgcaggtagcatccacatgttctctttgggcaacataatccttatactagtttgtgtacaagttagaagataaacctgtgataactgggtctctatctatctttatcaatcactcccagaaggcttcccttgttttgctttattgagagaagtgcaaggagggcagcagttcctgtatagactgctgagattctagcaatggtgaaagctttgcctcatctcctatcttttatgaaaaaaaagactttgtcatgaccaggtagttcttaatagcaacttttagctcataacatgaacaattttaggtcaaagagatatttcattgaatgtgtgtttaaaatgtttagcagactcttttctttggaatatgctttgcctaatgagtatatttttccaagtgtgaatttatctgtaaagcaaattttttttaattattatactttaagttctggtatacatgtgcagaacgtgcaggtttgttacataggtatatacatgccatggtcgtttgctgcacccatcaacctgtcatctacattaggtattttgcctaatgctgtccttcccctccctacccgctsataggccctggtgtgtgatgttcccctccctgtgtccatgtgttctcattgttcaactcccacttatgagtgagaacatgtggtgtttggttttctgttgctgtgttagtttgctgagaatgatggtttccagcttcatccatgtccctgcaaaggacgtgaactcatccctttttatggctacgtagtattccatggtatatatgtgccacattttcttaatccagtctatcactgatggacatttgggttggctccaagtcttaagcaaagagttttttaaacctgtgtatgcatgacattttagctgtgcttttgagacatagctatggtttcccatactaatgctattccaaattctttatgggatttgagaaagaggagctagctatttaagtaactatttttatggttataactacagtcaaatccttcatctgtctgacctgcaatgataaaaatcagctatttactttaaaaggcccaaaagttatggaccaagtgccagaaagtgagctgggagaaagaactcaaataatattgagcatctactatgtgccaggctaaatagaagacacttctatattagcycattaaattatatgatagcccataatttactcaagaaaatataactttgtaaagagggacagaaaaaattttgaactctattataaatgtctacaaatattcttagaaggcccaaagtttatttttttcagtaggttataagatataatgctgagtgaacacaagcagtaacctatgttctgtataccacctgatgccagttttaaaaatatgtattcacatacaagggtagaaaaaaggcataaaaggaaatttaacaaattatctgtggttatcttccagcagtggggatttacattattttcttttttttggtatagctttctacattttctatagcacatgtacattttataattagaaaggagttataaaaacatatgaacaaagaagtgaatttagtgttcctgagtttgagactaagctttctagaccagtaatttaacaaccagaatttgtactggtcatgccagttctttgtttttttgtttgtttgtttgttttttccccagcatttattttatttttattatactttaagttctagggtacatgtgggaattgaacaatgagaacacttgggcacaggaaggggaacatcacacattggggcytgttgtggggtggggggaggggggagggaaagcattaggagatacacccaatgtaaatgacgagttctttgtttttgactacgctggcatgcgaatacacatttctctcatccaacagtccattgaaatggttgagggttttttgtttgttttgataacagttaaatgcggagttaaaacttaatctagatggtctataagattgactttggaagttatttagcaaacggtatagagttaggccatcttggtatgaattatgcagagaagcaaaataattctaaataattaaatactaagaattatatttcaaacatcactaaaatatacattcaacacttaccttcatacttaaatgagaatttatggtgaaatttcaaattttaaaggctaatctgatgattagagtaaatgcatctgacttttttttgtcaagtatctaatagcagttactctatgtgtagaaaaaatacattgtttctgtatattaaggcaaatattaaaggcttattaaaaggcctcgtcgggttgttttcagagtcaaaggactctgaaatgcttaatgcttaagaaacagctgatgggggtgggagaagtgtaaaatctttgggagatttggatactggtaatgccatgtggtgttggtaggttaattccagtgtttctttcaatgaaataggcactatggcatcagtaataaaaactgtgaagtagattgttgaaaattgacctgtttcctatttagtgacttgggaaaatggtaaattttgtggatgttgagaaacaataagtgttatactcttacttgaaaaacaacttttaaaaggaaacattatacagtatttatttaaatattttacttctccatagtcctggaagagtactcaagtctattaagttttgctttggagtaaaagactaaattttgagcccttgatcagtatatatattcatttctgctaatgataaattaattgaagaaagcattccatgttttattgtatggcaacacttttatgtgctataaattagtttctctcttctctaaataactaataatacatcttaatttttaattcccttttctttgcttatttctcctgattttcccttcagcccttgggagtctaaatttgtgctggtcagtctggtggccatgagccacatgtgattatttaaattaaaagtagttaaaattaaataaaattcaaaatttggtttctcatttgcactagccacatttcaaatgcttagtaaccacctgtsgctagtgactgctataattggcagcaccgattatggtgttttcccctcattgaagaaagttctgctggaaggcactgttctaaattgtcaggacaacttaaaaattctttgggcatatcttcctgtatctcagagtatgcatatatatttcacttaaattttcctcttctattatttcattttacttttctgtttttcagtttaaaaggatgcttaatcgggagctcacccatctctctgaaatgagtcggtctggaaatcaagtgtcagagtttatatcaaacacattcttaggtgagaataacaacatgcaattaaatttttttcttcagttgtttgcttgtttgtttttgtaggaggattggggtgccaactcattttggaaaccaaacaagtgttagaagttctatttgttttcattcgtcatattaataattcgacactatccgcctctgagttttagagttgcaggtgacaaggtacattttcttagttttatttaggactttaggaattcttgaattaagattatatattgccattttttcatagtaccaaactgtaaaatatattttatagagagatctattcatatcttcaacaaattcttattaaatgccagccattgttgggcaataggtgtttaatgataaattagaaatgattcctgccctcgatgaatttaccgtcttgtgtacatcaagcctagtaaactggtgggcagataaaatacaattgctaaataaaagtttgctaataatagctgagtttggtgtcctgggacaactcttgtacctcatccacagaaagaaaatgcagtaaataaaggtcagtaatttgaatgtatcctggacttactttcaaaacaaaattgctgttatatatagttaacatttattaaacactctagaatatgttctatatataaggatgagttagagttgctcatcactgccttgaaatcgtggatgaaagtaagaagatatcttaggtcttttactatagaacacaattagcttatgtacgtattcacttatcaggtaatatttatgattctctatgctcccataaaacctggggatttaacccttatctcactatcatacagaaataaaaagtagcagaattaatctaagtcatccaaaacctgctgtttcagctcccacagtgttacccatttcagttagctgttagttttatatactgctgttttcatgacatttgcgtataaagtttctaccatttcaaagtatgtattgaaactgtagtccttagttggcaagaacaatattcagttcattaagtyagtttcacaaaggaatggaattgaacagtggaaataaccacctgttgtgtattctgagtctgctgtcatgctaagtcttgcagcattttttattaggacattgtatcaaagaggtaaccatggaatacatttgatattattattttgtaatggaacttatttgcttaattttgtgtttgaagacatcaaattaagtccaattcaaatgtaaatactgaactctctaaaaggaaactttttagttggaaacatttcctggaatatataatgatcaattataatccttccaattatgcatatgatataaaacagatagaattaataataaatatagaacattttctaaatttctcaagataagcaacatgaagtggaaattccttctccaactcagaaggaaaaggagaaaaagaaaagaccaatgtctcagatcagtggagtcaagaaattgatgcacagctctagtctgactaattcaagtatcccaaggtttggagttaaaactgaacaagaagatgtccttgccaaggtatgatgatttcaaagatcaggatcataaatattaaatgatgccctttcatgaattttcacttctagtcttttaaatggatagaaaagtttattaattggggttttttttttttctttttttgaagatgggaaggcattttataaagctccttttaaagtgccttagacaggtggtttggtatgttttaggggtttggggggtgattatttgcatcttcatttcattgtttggccttaaagagttagaaatctgtcatgtcttctgggttttaggaaaacagttaaggttttgtgaatagattttatccattaaagaagtgctttgtgattgatacttaaaaagtacataaatgtgttgtaatgtcaaagtcacaaggttaagccatactgttcaattttcagtacatttaagtaaatgtgcctaaagtttgcctatgcttacatggtgtgtctgttaacatttaaaatgaatcattgtttaaaacaatctaacaatctttacactgaagtctgttttgttttgttttgttttgtttgttttgagacatagtctcgccctgtcacccaggttggattgcagaatgcagtggcgcgatcttggctcactacaacctctgcctcctgggttcaagcaattctcctgcctcagcctcccaagtagctgggattacaggcacacaccaccacacctgactaattttttttatttttagtggagatggggtttcaccatgttgggcaggctggtttcaaactcctgacctcaagtgatctgcccgcctcagcctcccaaagttctgggattacaggcttgagcctctatgcccggccacctaaggtctgtaatttttaaatgattgtgttcattgagtcatattttactccactttctaatattttagtatctttttttttttttcactccaggaactagaagatgtgaacaaatggggtcttcatgttttcagaatagcagagttgtctggtaaccggcccttgactgttatcatgcacaccatttttcaggtaaggtggttgagttstattacatttattttatttaggaacttaatgtccagtctgtagcttatgcatacattttgtcttttttaatattccccaccttttgcttatttttatacttttatccttatttgctcctttgccaagggacaagtaaagatacagaaaggtggagtgtggataaaccacaaataacatcaattttgttattttttttgcatttaagaaaaagatgtgatatagccaaattgaagcaatttattaaaataataatttagacatcatcttagtcatctgaacctgactgcatagagaatggagtactaacttaaaaaaaatgaataaagcccctgctggctactaaccttagaatatagttttttcagtcactttcttgtgtcctgcttctttcttcatatccatttctctctcttattgaccctttgctccagcttagggtgggatttaaatgagaagttgaggctgctgtagatatctcgggaccgaaatgggaaacttcagccctagagaggacgttgatttttagttggtgtgatgcaggggttgagttaatagtgcttgactggagctgcctccatgataatgggacatagaaacttttagagttggcacctcattcctgacaccatacagctagggcgtagtattcttgggttccagcaggacaacccaactctggttttgtcccagagtccctggatcttctcagaggttcccattttcctcactagacatgtgagagtgcagttgccatttccaggttatccactggcaacactggtgtgtgatttttttttttaaacatactctatggagaaatttttcacataaagacaaaaatgttaagatgattttttttcctacaggaacgggatttattaaaaacatttaaaattccagtagatactttaattacatatcttatgactctcgaagaccattaccatgctgatgtggcctatcacaacaatatccatgctgcagatgttgtccagtctactcatgtgctattatctacacctgctttggaggtaaatctgtttctgaaatttcaagaacactaacttgccactcataaaggtctattaaacttttatctgaagggttttcaatggagaagataattggattcattggaagtataacttattgacttatgggggaaaatgctatagttaatagacaatcaagtctttgatggattttgcttatgaaagttggtcacagatttagtgattgatctgtttatgatattgcttctttgaaatgatccactgaacatttcataaagcacatctggcttactcactttttgttcatttgttttcttgaaatctagtctgacggcttttatttataggccaaagaacgttttataaaacataagcaatatattgatattttttcatagaatatattagaaggacatactttaatttttctaaatcctaagaagttatttcattagttgtttactaaagcaatttgattttcttaagaaatatattttataattcagtttgttttcattataaaattatgttaatacctcatcatatgggtgagtgattctcaactggagatggtttctcttcccctttctttccctcctgccaccaccagggacatttggcaatgtctggaggcatttttggttgtcacaactatcacatttttagttgtacatgatactggcatcttgttggtagaggccaggaattctgctaaaaatcctacaatgcacaggacagcctcccacgcaaagagttattgggcccaaaatgtcaatagtgctgaagttgagaaaccctggtttcgatgaaagaaaataattgctaatgtcttactaattttatgtacattttcagaatattcttagacatcttaaatatttagaaaataaactattattttcttttaaaataatttcagagttttaaaataatattttaaaaaatacagtgaatggaaaacatttgatcatgagatgtaataaaattagataaaatattttcttccaagattatactttaaaagttcacaagtatctaagactctcccttgacacattgtaacacattttgaagcttcattttgttttccatttaaattctagagatttcttatttgtttatacttttaattcatatcattgtagaatagtaatattatctatattgtctgattttccaggctgtgtttacagatttggagattcttgcagcaatttttgccagtgcaatacatgatgtagatcatcctggtgtgtccaatcaatttctgatcaatacaagtaagtaaactttattttttcagaacacatttttcccttgtacattttagaatgactaagggtctttataaactcagagtcttccagagccataatgttcttttgagatgtgtatatatgtgttttagtgatagttcatgttaatgtaatttaactgaaaattatcattatatcccttgaggcatgtgatatttgaaaaatgtgttccagttctctttaaaagtaatatattgctgtgttactagacaagggtaattaaaaatgaaagtgtgcagaaagatttagaaagttgtattggccctaaagttttaaattaaaaaaaaagttatgagaattaatggtaagtgttcctcactttatgtaggtcatcatttaatcctcttcagaggccatagcttcccttcctcctccatgcccaacccctgttctttcctttttaaaatcttctaataagggtaacaggaacttcttaatattytttcaaccatttggttttttctcactgttaacatctcaccttataagaagtcatcactgaatttggaaatataaggaatagtagagactgtttaatatggagcatctctgacattgccgcacagaaagcctgtgtagggaatgtttaggtaatgcttgagctatcccttggtaaagagatttaggtttatagaaattctatttggtacttgaagttaattggtaagtgatttaagtgaactatgacttaattccctcccatatggtagattataaattatggtagattataaaatcataaattcacttttatatataaaaaatatgcaaagttgttgaaaatgttgtatgcttaagaatccacctttctttcatttttgcttgaggctatgaataatagtcttctcgtgcctatagcaatctagctatagaattatttatgaattcaccattcatttcctgtactttgctgtagccagatttaaagaaggaatgtagaggtaaccttgctttgagagatttaattcagagctttaggattatttacctatttttatatcttataatggcctctggactatcctatagcaaaatatactctaatgactcatccatgtagaggactggaaaagtcagggatttcctgagatgtgtggttagtcaagtatttttttacaagtttagtttaggaacttatttatccagattagacaggataacatttcatgttctacctacctatgagcacctataatgaggtacttttagaactcatcaaagcatacatacaaatattaatatacattggatgcagctccctgcatttacatggtatcagtggggaggtatcagtggggagggttcattatgtcctttctaagaagagcagggaggtcatgcaatacagtgcatgctggcactttacatgagcctggcctgatttattttgatgcttatgaatgtcttgagatattctgaattttatcaatttttagtaaatacataaaatgtatttttacataaaatttttgtgttaaaggtatatatatatatctatcttaaacaccaaacattcaaactggtatgttttctttgcattctgttatatagcatattatatgttcccttagaattaagagtagatttagaagacaaattaaaacaactgatagaaaggtcactgtcttccaagtactctgatacattttttaagggtaatgaggacctgctctattcttcattcttttgagcccttaaagcagcagtctccaatgtttttggcaccaggcaccaggttttatggaagacaatttttccataaactgggggcgcagggagagaatggttttgggatgaaactgttccatctcagatcatcaggcattagttagattctcataaggaacgcacaacctagatcccttgcatgagcagttcacagtagggttcacgctcctaggagaatctaatgtccctgctgatctgacaggaggcggagctcaggcagtactgatgcgggcttgcctgctgctcacctcctgctgtgcagcccagttcctgacaggccacggaccgatattggtccacagccgatggatggatcggggacccctgctttaaagggcacttgggctttgactggcacctggaggaccctggcatcagggtccctgtgcagtctgccatttaagctaacaaggcctcagtctacagatgaatctgatactctaaagtttgagaaccaatgaaatagtggaggaaactgaagaagataattttatctccttaggatgtctgtttaaagtcattttgctggtgacctgcctgggatggaaggataactaatcctgccgctgcaaattctttctttgttatttagtaatattgcaatgatctcctttctgtgtgaccacagcgacatagggaagttcacagttgccagagtagctttggattgctaaagtttttttgacgatgaggtgtgatgaggctgtgttattcctgagggaatgaatcagcattgtcactttgtacaggaaagtatcccagggttgttccgggccccagggcattatcaaaattacagccttagttagtttggtttggctagggatcatgtaagagaattatcttcccagcatgcagtaaaggaatccttctaataacttgtaaacttgtgatatgtagcttcgtgaaatattttatcaaaatttgtgcttatttttagtttgcagtaaaccttttttaaaatttgactttttatattttatggatggcttgagcatccatgtgtcaagccagcacattctcagctcttgcctcagagctggagctgccatcctgtccaaagcctgcagctgaatccatatttctcataataaagaattctaaagacctctgattatcaaatttataaacccatagttggttacttgtcttactttaaggaagctacggaagcactgagagcttaaggcacatggggggcgctggggattcccttggctggttcccagggcagttaatcctcctgcttcttacatgtgctcttcgtttttcttaattatttcagttgttttagctttaggtgccaaatgattttatactaattgtatttacactcgttgaaagcatgctggaggttctgcaagcagagagaacaattctacctggtagagttggttaagctataataaatgatttgagtgtgggtactgtgaacaggatttagagaaattgaaatttcaggcaggaagctgcgtaaatatttttaaaggatgatgcatataaataaatccataggccaggtgcagtggctcactcctataatcccagcactttgggaggtcaagatgggtgaatcactgacgtcaggagttcggagaccagcctggccaacaaggtgaaaccctgtctttacaaaaaaaaatacaaaaaaattagccaggtgtggtggcgcatgcctgtattcccagccactcaggtggctgaggcaggagaattgcttgaacctgggaggtagaggttgcagtgagccgagatcataccatcacactccagcctggacaagagtgaaactccatctcaaataaataaataaataaataaatccataaaatgtaaatagcagcatgaacttttgaatataaaatgctggagggtatatttaacttagctttattttctgaaaaaaagtatcaaaagtacagaatatagcattaaattttacttggcaaatgaattatttttgttaatagcaaagatgcctaagtttggggcagaaagatttattcacattagtgatgcattcaaagcatgcggtttttggtttccaagagcagaggcatttcattatattaaggttaagatgtatctagctgtcagtatacacttttttatttctctacttttattttgaaattaaaattttcatagctacactagtagattgtatgtagaattttatttttctgtataaacccacaccttcaaaataaggataaattcatgtttatcaaatgtgattatatagatatagctacagagattattttattcaacaamaatgtactgcaagcctactaaatgttataataaatattatttcaggcacttaggacacatggstggacaagacaagacaaatccctggctcttaagagctggcattctgctagaaaaggtggagcataataagtgaatttatggcatgtgatggtactaagtgctatggaggaaaataatgcagggtgagggcatagagagtggagtgatgaatgaggcagttttcttgacaactgaatattaagttaaaaccaccacttccctctgtcatttcatggagaaatgtttgtttctgaagtccttttgaagatttatgtttatttcagttgtaacttagagacatggtgtagcatgctgtcattttctaactaactcaaggctaagcctagtaaagctgtaagaacagtgagtgtaagtcttacttacaggatacatatctatagtgtctgccccagtcttaactgtttcagctccaggtcttaatattggctctgatctgccatgtggactccatcataagacacaaaaaggcacaatacctagtggacttagttggatttgggaggcaatgtattccttctttgtgtgtgttactctggcccatttactaagtgatctgaaaagctgctagtttagatggggcacagaacaagagagtgtcacaaaaactgctagttttgagtggggctctacaacaggtccagcctgctgtgcaagctgctctgcacatgggccacatgatccagcagatttaatggtgcttgaaatgtcagtggcagataggaatgttgtttggagcctttgacagagccctctgtgtgaatcacagcacagactctggagcaagaccctgccatcatccaaagaaagataactaactactctccttttgaaagaaagatataggcctgctgctgggccttaggagatactgactgactatgggccaccaagtttccatgtggtttaagctgtctgcccatcattaatagggtattatctaacgcgccaagccatatgttgggcatgtacgacatttcatcatcaaataaaagtagtgtaatacacgatctatcaggtccgagcagacactaaaggcacaaattacataaagaagtggccctaatgccactcctattaattacactgccttctttctcccagcctacacatgtggtcgcatggaaagttccctgcaagtagttgacagagggcctggtttacggatggttctgcgtgatacgcaggtaccaccggaagtatacagctgcagcactactgcccctctctgggacatctctgaaggatggtggtgaaggggagtctttccagtgggaagaactttaggcaaggtgactcgttgttcactttgcttggaagagggaatggccatatgtgcaattatataccagttcatgggccgtagccaatgatttgtctggatagtgagggacttagaaggaatatgattggaaaactggtgagaaagaaatttggggaagagatatgtgaatgatctctctgaatggacaaaaaaggaatgctcaccaaagtgtgaccttggcagaggaggattttaataaccaagtgaataggatgacccattctgtagatactagtcaacttggttccctagccacccctgtcatcacccaacatgctaagaacaaagtggccatggtggcagggatggaggtggcaggatgtgcttagaaacatggacttccactcaccaaggctgacctggctatgactattgctaagtgcgcaatccaccagcagcataaaccaacactgaacccccatataacaccattttggggggatcagccagctacctgatggctggttgattacattggaccacttccatggtggaaagggtagcattttgtccttagtggaaaaggcactttctctggaaacagatgtgccttccctgcagtttttctgccaaaactatggtattccatacagcattgcctctaaccaggaactcaccttactggcaaagaagagctgcactgggctcatgcccatggaagtccctagtcttaccatattccctaacatcctgaatcagctggcttgataaattggtagaatggccttttgaagactcagttactcagctaggaggcaagaccttgcagggctggggcaaggttctccagaaggccataaaggccatatatgctctgaatcagcatccaatatgtggtgctatttctcgcataaccagaattcatgggtccaggaatcattggatagaaatgggactgttacgactcataattacccccagtgacccactagcaaagtttgcttcctgttcctgcaaatttatgtgctgctagctagaggtcttagtttcagaaggaggaatgcttctatcaggagacacaacagtgattccgttgaactggaagttaagacctagccactttgagctccttatgcatctgattcaatcatccaagaagggcattacagtgttgactggggtgactgatcctgactaccaaggggaaattgggttactactccacaatgaaggtaaggaagagtatgtgtggaataaggagatcccttagggcatcccttagtattaaccatgccctgtaattaaggtcagcacaaaataacccaatccaggcaggaccactaataacccatacccttcacgaatgaaggtttcggtcaccccaccaggtaaagaatcatgaccagctgaggtgcttgctgagggaaaagggaatacagaatgagtagtaaaagaaggtaattacaaataccagctatgaccatatgaccagttatagaaataaggactataattgtcatgagtattttcttatgaatgcatttatatgtatatatacatatattaagcatatatcttcattttctttttcttattcccttatataacataagaggtattaacttatcttcattttctttttcttattcccttatataacataagaggtattaactttatattagtatttaagtatttattttatatcatagtatttaagttataggctatcaggataagagtaaacattactcaaaaactttactttcacttctggggaatgtgttagtgtgcttttagttgtatgcaggatagttgtagcctgtttggtagaattatggccttatggagattaaatatggttaaaggagatgcttatgggtaccagggtgacaaggggcagaatttgtaatggttaattttatgtgtcagcttgactaggctaagggatgcccagatagctggtaaaacactattttggggtgcgtctgtgagagtgttcctggaagagattagattagcatttgaattggtagactgattaaagaagattgcccttaccattgttggcagggatcagtcaatccattgaggacctcaaagagaagaacaaaaacattgggggaaggggcaaattttgctttcttcggagcctggacatacatattctcctgcctctaacatcagggttcctggttgattctctggcctttggacttgctttcctggttcacctttgcagacatgggacttcttggactccataattgcctgagccaattcctataataaataaatgtgtctttttctcacatacacacacacactcatacatatgtctattctatttctctggagaaccatgattaatacagagagagaaaagattagcacagatgaagtacatgttctcagttatgtggtagtacctgcccacccttccccccatttcattagcactcagaagagagggacacaaaagtggtcttcctgccttcagtagtagcatatgttgggcataatttaatttattcttgatgatccagggtagttgtaacaaatgagcacaattgatctatatataataaaatgatggctttgagtttgtaaaggtatgcatggcctctcaataaaaaataaatacttacaaagttgtctttataaatgtgtgccaggcactgagtggactgtgttgatttcctggttcatgtttagtgttcactgctcaggttttcacctctataaggtacttgtaatcatagtcagtataaggtgagggctctagaaactgcctggttttaagtgctggccccagcacttactggctaggtgatgttggcaaagttacctaccttctctgaggtacattttcttcatttgtacaggattatatgagtatgtctatgtaaatatttatgtgtataaaagatgtccccaagggacattttctatcccccagcctatcccaaggacacaaagacttacttcccacctatatggctccatgccatccatgaatggaacatagccttaaaatgtcgataacaacagtatcttcctaaaagagttatgaggattaaatgagatgattcacataaaccatttaacacaatggcacctaaatcctctaaatgttgtgccttgctgtattcctgtttgtactttgtaagtttgaaataattgaagtgcctaggggaagccagataaccaaacatattaaattaataacctttaatattttgtaggggcttaagtctctaagtaggttgggagggtttggggaggaacgattaaaagatttgtagagataaagacaaaaaaggtagaatgcgatacatgctaaatgggtggtacaaagtagtatagaagtttacaggagaaagtgggcagtttcatctggtaattaagaaagacttgatggaagaggtaacttatattgggcttgaagatgaaagggtttcaacaaaaatgttatataagctaacctctttgcccctctgtgctgtgcactgtaccatcctgacagcaactttctgatcattcctgaaccttcaaggactctacttacaagtaatggattagtgtctttgatgaaaatctgctgaggagctgcagactcctacctcccaatttaaatgtgaccatatgccttcagtcctaaagaagagtagaaagttaaataacttccttgagattcagtttcttaaatgctaacatttgttcatttaaaaatcaacagtcaccaccactttcctgtaacagcatctgagatggaagaggctatggaggcctgccagtccactaaggcatcctttcctggcttttctagccaatctggactctttaagtgtcaggagataaccactctccaagacaggccttgccagtattcttggacatctgccctacatgaaaggccctacttatatccagtagaactcagactctttgttgcaccttccatacaacagatcacccttttccttgaaggaagagctcatcatcttattcttttgcagggtcaacagccttaatttccttcaccttcagcttcatataagccaattagggtttttgtaaggctaagtcaattctgttaacactgcttgtctacatgcatatttccttccttaaacgaactctaataattatccagtatctaataattatgccttcctttcaatatatgtttgtttatttgattccactgtagaaatacaataatatgtgctaagaacctatatagttttaaatttttcatttctatatgcttacctatctgtagataaaggttcataaaggcatttatagacactataaaagttcaccagaaactgccttttaaaagataaacactattgttttatctaaagaaaacaaaaaataacaaaaaaatactgtacaaacctactccctactagtctaaacagctctgctcctgtagtttgggagcagaaatttaagtgtgcaaatttgtatttctatagttccgataaaataatagaatttctcagttgaaaatgtcttaagcctctcctctccttcctagctccattaaaatagccattgaatagtattgggtatttctttcttaaaaaaagatatatatttccaaatatattttctatgcattcgttatatattttctatgcattcgttagaaaaaagatcaaatacctgtgcttttaacctttttcttttcttttcttttctttttgaaacagagtcttgctctgttgcctagtttggagtgcagtggcacgatataatggctcactgcagccttgaactcctgggctcaagcaatcctcctacctcagcatcccaagtagctgggactacaggcacgccctaccatccccagataattttttattatttgtcgagatgaggtctccctatgttgaccaggctggtcttgaactcctgggcttaagcaatcctcctgcctcggatttgcttttagtctttacagtgattaagtggaaagagaataaagcatcaaaagttttttaatgattatcttgtagctctgggtctgctatttacaagaagtaggagagaggcagaatctctccctgcctaaaattcacaggtctagggcagtagggagagagtggcagaatcttcaccagagggtatacagacagccaaacacaacatcactgtgaagctgtgagcaagcaggcaggaagagcaatatccctgtacagtatacaatgactgccacgatacttggaaaagaaaatggaaaacaatgaataaagcttggactttcagagctatacatgagcaaatgagcaaatctaaacttgttcatatgattccttattgttcttgtaccctctttgagtacaaacaatcctgtaacacaggatcctcactttatatagtgcagggtaggtaattcacagttatcaggaatacaaaaccttatgctctggatgtgttatagatactaagaataatgtcatattctgctgagctcatggcaactctagaggagaggttaaagatccaattctttcactttagagaaagctgagacctacagagtgaaatgacctgccacatgttagtagcattagaattcactccccaagattcattccagtgttgttcctgctcttatgttatctgatttattctctcctggatattgtcaggtaatgataagggcagcagagaagtttaggggaaattacatcctaaatccagaattttaagaatcagataaacttctcacaaacagttttgctgatctttggccttttgtcttttttacagactctgaacttgccttgatgtacaatgattcctcagtcttagagaaccatcatttggctgtgggctttaaattgcttcaggaagaaaactgtgacattttccagaatttgaccaaaaaacaaagacaatctttaaggaaaatggtcattgacatcgtaagtagctgataaaagccaaagaagagaactgtgatgcaagttgtttataatttagacataagaacaagatgagtattaggtaaaaggaactgcatttcaaaacatattatggccctttatgttatagaagctgcccgtgatgctggctgtgatgttctgtaataggtttttcacttctagcagtttggacttgagaataatgtcagctcaccctcatcatttattttctgggcccctccagtctggtggcgggcagagaaaaatgactaacaaaagcagattgtgtgggccacagctcaaatggattttttccccaccttttctcatcagtagacagtgccatttagacatccatgactttactcttttttctatgcatcttattcagtgattatgagacacaggaaaatctctagctttcaaaaacttataaacttgtgatgatgtcttatccatggagatgtcacccatttttcaccatgaaagtggttgtcagtgcctagcatttctgtatattacacacatttatctgggctttgggaaaacttgatagcaaaggggaaaagactctgcccccaaggagtagtaaggattttccactgtcattaaaaggcatagtgttgttttattcctttttcattcttatattctgcgtaatattttcatgtgtaaattctgttttctctgaacttaataatatactctatattttaaggtacttgcaacagatatgtcaaaacacatgaatctactggctgatttgaagactatggttgaaactaagaaagtgacaagctctggagttcttcttcttgataattattccgataggattcaggtaaagccttgtttgagtttgctctgtgtgtgtgtgtctgtgcacatgtgcacatgtctgcgtgttcagctttgataagatgtatttcttccttctcccaccttatactttcagcaattgtaggcaggatttttatccaaatttttattcctgagaattaaccaggtaaaattctactggtctttctgtttgcatctacattaattaaaaaaactaacaaacaaacaccccacagaaccagccacttaagcagctctgaatctagtcagccatgcacataaacagtttctcttaagctatttagatgcagtagaagtggcataatttggaactattaatacaagtgtgaactatacacagacacatcatggttgagctgtttggaataaatcttacactacgtgtatttttaagtgtygcagtcatccaatgtgaatttctagttttttttgtttttttttttaaaaaaaaggaacaggagtgaatagagaatgcatccatctattttaggttcttcagaatatggtgcactgtgcagatctgagcaacccaacaaagcctctccagctgtaccgccagtggacggaccggataatggaggagttcttccgccaaggagaccgagagagggaacgtggcatggagataagccccatgtgtgacaagcacaatgcttccgtggaaaaatcacaggtaatgcatgaagtgtatagctttcagagagaacagagctaccgctttagcatttggttactttgtattacatatgatagtattttactggatttttaaaattactttgtttttgacaagctcaatttcaccttagtatttatgatccaaagaactttcattcttatgacttacattcatatagtcatatatatattctaaagacatattcatttattatgactatattcatttaatatattcatatacatagagcacatggcattatttcagttatctggattcacctacaaattggtgattgtaaaataagccctaccatgtcaacaactggaaaattttttatgctatagaacatgctctttaaccaaaggttctagaagctaattttgaccagctagtagcaatactttactttaaatggtctgttgttgttgaaaatagtgacaattttaccaaactaagtttagtagtcttctgttcagtgttttatttgtgggccatgatctaattaagcttttccattgtttcttagtcccaagtcctctactcatactggatttttttcttaactaggtgggcttcatagactatattgttcatcccctctgggagacatgggcagacctcgtccaccctgacgcccaggatattttggacactttggaggacaatcgtgaatggtaccagagcacaatccctcagagcccctctcctgcacctgatgacccagaggagggccggcagggtcaaactgagaaattccagtttgaactaactttagaggaagatggtgagtcagacacggaaaaggacagtggcagtcaagtggaagaagacactagctgcagtgactccaagactctttgtactcaagactcagagtctactgaaattccccttgatgaacaggttgaagaggaggcagtaggggaagaagaggaaagccagcctgaagcctgtgtcatagatgatcgttctcctgacacgtaacagtgcaaaaactttcatgccttttttttttttaagtagaaaaattgtttccaaagtgcatgtcacatgccacaaccacggtcacacctcactgtcatctgccaggacgtttgttgaacaaaactgaccttgactactcagtccagcgctcaggaatatcgtaaccagttttttcacctccatgtcatccgagcaaggtggacatcttcacgaacagcgtttttaacaagatttcagcttggtagagctgacaaagcagataaaatctactccaaattattttcaagagagtgtgactcatcaggcagcccaaaagtttattggacttggggtttctattcctttttatttgtttgcaatattttcagaagaaaggcattgcacagagtgaacttaatggacgaagcaacaaatatgtcaagaacaggacatagcacgaatctgttaccagtaggaggaggatgagccacagaaattgcataattttctaatttcaagtcttcctgatacatgactgaatagtgtggttcagtgagctgcactgacctctacattttgtatgatatgtaaaacagattttttgtagagcttacttttattattaaatgtattgaggtattatatttaaaaaaaactatgttcagaacttcatctgccactggttatttttttctaaggagtaacttgcaagttttcagtacaaatctgtgctacactggataaaaatctaatttatgaattttacttgcaccttatagttcatagcaattaactgatttgtagtgattcattgtttgttttatataccaatgacttccatattttaaaagagaaaaacaactttatgttgcaggaaaccctttttgtaagtctttattatttactttgcattttgtttcactctttccagataagcagagttgctcttcaccagtgtttttcttcatgtgcaaagtgactatttgttctataatacttttatgtgtgttatatcaaatgtgtcttaagcttcatgcaaactcagtcatcagttcgtgttgtctgaagcaagtgggagatatataaatacccagtagctaaaatggtcagtcttttttagatgttttcctacttagtatctcctaataacgttttgctgtgtcactagatgttcatttcacaagtgcatgtctttctaataatccacacatttcatgctctaataatccacacatttcatgctcatttttattgtttttacagccagttatagtaagaaaaaggtttttccccttgtgctgctttataatttagcgtgtgtctgaaccttatccatgtttgctagatgaggtcttgtcaaatatatcactaccattgtcaccggtgaaaagaaacaggtagttaagttagggttaacattcatttcaaccacgaggttgtatatcatgactagcttttactcttggtttacagagaaaagttaaacagccaactaggcagtttttaagaatattaacaatatattaacaaacaccaatacaactaatcctatttggttttaatgatttcaccatgggattaagaactatatcaggaacatccctgagaaacggttttaagtgtagcaactactcttccttaatggacagccacataacgtgtaggaagtcctttatcacttatcctcgatccataagcatatcttgcagaggggaactacttctttaaacacatggagggaaagaagatgatgccactggcaccagagggttagtactgtgatgcatcctaaartatttattatattggtaaaaattctggttaaataaaaaattagagatcactcttggctgatttcagcaccaggaactgtattacagttttagagattaattcctagtgtttacctgattatagcagttggcatcatggggcatttaattctgactttatccccacgtcagccttaataaagtcttctttaccttctctatgaagactttaaagcccaaataatcatttttcacattgatattcaagaattgagatagatagaagccaaagtgggtatctgacaagtggaaaatcaaacgtttaagaagaattacaactctgaaaagcatttatatgtggaacttctcaaggagcctcctggggactggaaagtaagtcatcagccaggcaaatgactcatgctgaagagagtccccatttcagtcccctgagatctagctgatgcttagatcctttgaaataaaaattatgtctttataactctgatcttttacataaagcagaagaggaatcaactagttaattgcaaggtttctactctgtttcctctgtaaagatcagatggtaatctttcaaataagaaaaaaataaagacgtatgtttgaccaagtagtttcacaagaatatttgggaacttgtttcttttaattttatttgtccctgagtgaagtctagaaagaaaggtaaagagtctagagtttattcctctttccaaaacattctcattcctctcctccctacacttagtatttcccccacagagtgcctagaatcttaataatgaataaaataaaaagcagcaatatgtcattaacaaatccagacctgaaagggtaaagggtttataactgcactaataaagagaggctctttttttttcttccagtttgttggtttttaatggtaccgtgttgtaaagatacccactaatggacaatcaaattgcagaaaaggctcaatatccaagagacagggactaatgcactgtacaatctgcttatccttgcccttctctcttgccaaagtgtgcttcagaaatatatactgctttaaaaaagaataaaagaatatccttttacaagtggctttacatttcctaaaatgccataagaaaatgcaatatctgggtactgtatggggaaaaaaatgtccaagtttgtgtaaaaccagtgcatttcagcttgcaagttactgaacacaataatgctgttttaattttgttttatatcagttaaaattcacaataatgtagatagaacaaattacagacaaggaaagaaaaaacttgaatgaaatggattttacagaaagctttatgataatttttgaatgcattatttattttttgtgccatgcattttttttctcaccaaatgaccttacctgtaatacagtcttgtttgtctgtttacaaccatgtatttattgcaatgtacatactgtaatgttaattgtaaattatctgttcttattaaaacatcatcccatgatgggatggtgttgatatatttggaaactcttggtgagagaatgaatggtgtgtatacatactctgtacatttttcttttctcctgtaatatagtcttgtcaccttagagcttgtttatggaagattcaagaaaactataaaatacttaaagatatataaatttaaaaaaacatagctgcaggtctttggtcccagggctgtgccttaactttaaccaatattttcttctgttttgctgcatttgaaaggtaacagtggagctagggctgggcattttacatccaggcttttaattgattagaattctgccaataggtggattttacaaaaccacagacaacctctgaaagattctgagacccttttgagacagaagctcttaagtacttcttgccagggagcagcactgcatgtgtgatggttgtttgccatctgttgatcaggaactacttcagctacttgcatttgattatttccttttttttttttttttaactcggaaacacaactggggaaatatattctttcccagtgattataaacaatctttttcttttttttaagtccttttggcttctagagctcataggaaaatggacttgatttgaaattggagccagagtttactcgtgttggttatctattcatcagcttcctgacatgttaagagaatacattaaagagaaaatactgttttttaatcctaaaatttttcttccactaagataaaccaaatgtccttacatatatgtaaacccatctatttaaacgcaaaggtgggttgatgtcagtttacatagcagaaagcattcactatcctctaagatttgtttctgcaaaactttcattgctttagaattttaaaatttcaccttgtacaatggccagcccctaaagcaggaaacatttataatggattatatggaaacatcctcccagtacttgcccagcccttgaatcatgtggcttttcagtgaaaggaaagattctttttctaggaaaaatgagcctattttattttattttattttattttttgacacaaactgtagattttagcagccctggcccaaaggaatttgattacttttgttttaaacagtacaaaggggacactataattacaaaaacatccttaactgatttgagttgtttttatttctttggatatattttcagagtggtaaattgtgtgtgagaattacaaatgattattcttttagtggtttcttagcctctcttacagcccacggggatagtactgtacatcaataccttcatatgaaatttttatatgcaatgaaaataaaagcatgggttgattctgcctatttatgactcaatcttttacaaataaaagattattcattttaaattatagttcaatcagcatgtctcttaggatactgaacgtggttgaaatgaaaggatagtgacatcataagttagtactgatattcataaccaaataaagccaacttgagtaattttgctacattaaaaattaccaaaattacttagatggcctataagattaagcatggtgttttctaagcaagctttgaaaggggccttccatacttacttaattgaatattctgggatattgaaaattattcagatacttgacaattatttttggttacctactccgcaaactacaaagttttaaggactcaacaataagttaatgagacacagtgtttgctttcatggagcttacagtctggaggggacaaaggcttaaacaatactcatataattatatatgtgatcagtacaatgaaggagctcagtggggtaaataagcaggaacctgaacttgatctgttccggagggccacagaaggcttccttgaggcyttgagaaagtgatttgcatctgagttctgaaggattgtaagaggtaactagggaaaaagttgacaggaagaggaaggggatccagacaagaaacatttgcaaagatcttgaggcataaatgagcttgagacatctggagaaactgaggaaaagtgagagagtaggcagggcctggagccgcagagccattgctaaccatcctgtgtgagatatcccccattctgtagctttattctcataaccctgctcaattttctttataacacttctcacagatttatatacgtgtttgtttttgttatctgtctctcccaccagaccacagctccatgagagcaaggtctttgcttaccaatatatcactagcacttaaaactatgcctggtacacagtaggttcttaatatgtgttgaatatagccatcaaattgatattggatataattcaatctgataagatattttgagatattaaagagtttttaacttgataccataaaaactttgtttgttttttgtttttgagcttactaagatcctggataaagagtttagagtttcctatctctttgctaactaaaaactctgtttgcttattcctcacaaattctacttttttctaaatgacaatccatttgtcatgataatgagagtaaagaaatcagcacaaatttaatccccagatcatccccagaccatgccagcagaataagggtaattaaacagagcatctatgcttagcctctccaccatttctcctgccacaacagtcctgacagccaacaggtgccaaatttgtgccttcctgggaataactgttttaaactcaagctcccttccccaaagccatgaccccaaagtgacactatggaactaaggaagcaactcccttcttttcctgacttgccacgcttgctgatttaggctaatttgggtggtggtgggcctgaactcacattaaaatctctgacctggaaacctttcctcaggcacacggctttggacccacaacagcaacattccaccaaaaaacaaaccaaaaccaaaaacattccctgttgctagagagtaccacctgtctaccaaggggaaaacaaccttgtgtcaggggaatcataccagggctttcccatccttctgatttgggtcctgcatcccacccagctactccgagagctccaaatactctaggtcaaactcagtgctatgggtataaatcttgaatttgtacacataggaaatactactttatttcctttaaatcaattaatctggactcggggctccagccaatcacactattggaaattcccatctctcattactgccacagctcctctctctcccaacataaaatttatcttatctccaatataatctgagtatcaggcctctgtgttgttccagcagaggttccttacagtccctcagctattagcttcctggtcacatgtggtgtaccaggaatatatgctggtttggggccctgcttccacacagtgtgtgcatcaaaagagcctatccttctggtgttttattacaccttgctgtggtctgaatgtctgtgttgaaatgctaacccctaggtgatgctattaggagatgggggccctttgggagataattaggttatgaaggcagagtcctcatgaatgggatcagcgcccttataaaagaggcccaagggaccttgttcaacctggccaccatgtgaggactcagctagaaggtgccatctgtgaaaatgaaagcaggtcctcaccaggcaccaaatctgccagaaccttgatgttggacttcccagcctctagactgtgagaagtaagtgtgttgtttataagccacccactttatggtattttcttatagaagtctaaggagactaagacatacctactgaaattactacaaaaaaaagcagttctcttcttttcctaattctcaacatattctccttcttctctctccttccttcttttgctctccaatgagatcaggcttaaaaccaaaaacgaaacagactagaggtagttctgacttccatttgcttctgctctccactctgcaaaaaccctggctattatttgaaatatggagacgaaaaaagatattggaagagcatacattaaataatagtccattaaccttccacacatggttggcaacatctagatccaacaatgttcactgaacattttgagatgtgggaagttgaggaagttgtctccaagaggaagtcatcaggaactcccatacttcctatgtgggaacacagggaaagaggcattttttcctgaagtctctgtgttccagtgctatccctgaatgtctattcccagctctcgcttagctgtttcaatgacaagatatagcacttgaaaattttataaagtgagagtcatatttgctccctgctgcaagcccccaccctgccattccaggaccctgctatggtccacaattggcattatgattccctctattttgcagctatgaaaagtgaggcccaagaaggttaattgacttggctaagattattcacaggctaaatactgagattaatgatttgcaaactacagatttgacagaagtcctaatgctatctctacatcctatttctgttgaggaccaaaattgactgttgcattgcctttgatttcctttgaccatccttcattacagatttcagtaatttttatggtccaaagctaggtgacagatattacatcatatgcatttgttaactcaccctatgtctgcatagccttgctatatggtcagaattctccagattgactggggaacttggagttaaagagcccctgaccccctaaaaaattatagaaaatgaaagaagctgtcaagaaagtaaggagcagagataagagcagagatgggagygtgcctctgcccggcagagactcacaacatgaggcaagacagatcttagctgaacttcttgcaggatgtatgcctcaatgaaaggaatggagcacgggcagcatccggcttaggctggagccccttcaaccatcatggctgttttagcagggtgtttgccagctgcttacaaatcccaagccaacagacatggtttcaggacctgaatcatgcaaacatattttctgaaaggttctatcacctgagaattgcttttccttcgctccttgtttttgaaccaaaaagccgaccaaatgtatagtggcaaacacttgctcagcacccatccatgcaaggcactgttttaccaccaggctgcatcagttagagaaccaagccgtctctcaccttgcagcttcttcacactttgctcattttctctctaacactgatggtttctgtttcctgctattcagttacagcatctgggaagagagtggcagagaacgccaggcaactgcaccctgccacagtgggtcaagcggaggctgggtggtgacacccgtctctacccagcagaagtcagtggttcatgggtggagaacaaagctcaggacagctgctgcagtccagggaactgtccaccatagaagactcttgggaagcagcccctgaccccaaccccctgtgctttttgaagccgtgtctggtatcacatggaattatgcagtagtcatagaatatctttgaaaacttatattctaaaaataattgctgagatcagcgattaaaatatctaataaatggactggaaaagttgaaaacaagcaaaggtgagagaaaacaattgaggaaaactgggagaaagtgaaggaagttggaccctttgtactacagcatccaaggacagtgatgatatcttctgttccccacaggacccaggttcctgggtgcttaacgtaacacataaggcccttaaggatctaatcaaactaaatcatccccaactcctcccatcaaccccacatagatatccctgtgcctcagctaaatgctgcctttacaccttgcctttacatctctctgcctggaaaacagctcatccctcttgatccagtttaaatacacctttgtctggaaagcctttcccattagtattttatacacaaccctataataaatatttcccctaatatgttgtattttttaaaaaaattctttctctcactagattgtgagatttttaatttttatttttttagacagtctcactctgtcacctaggctgaaatacagtggcgcaatgttggctcactgcaatctctgcctcctgagttcaagtgattctcctgcctcagcctcctgagtagctgggattacaggcatgcatcaccacgtccagctaatttttgtaattttttagtagagatggggtttcgctatgttggccaggctggtctcgaatcctgacctcaggtgatccgcccaccttggcctaccaaagtgctaggattacaggcgtgagcsaccacgcctggcctagatagtgcaatttttaaacatcaatgtattcctttttgcctgctagtaaggaattaagtccggatattaacatttgactattctttcccctctaacaccaactcttctcaaaatgtggtccttgagctgacattaacgtcaactaggatcttgttagattataatctagccccagaccaaggctccaggaaaagactctctaggggtggaccctagaacctgtgttttaacaaggactccaggtgataagtatgctccataaagtttgagaaacactgttcaagacatcatggaggtgtttttctatttctgttttttttaagaagcaagttaataatctcaaccacctttctaatgtatttcatttaatcaaagggatacttgttgctacaggagttacaacagatgacctagtgagggccacaggcagtctgaggaacagtaggatcccatgtttggccaatgtctatcaagcaagaaaggaatagtgaagccagctattagctcccttcagcagaggaaacctgggattaggagtcgccatcaggcatcatggcatcacaagcaggcatgggttraagatttaaatgttgcaaaaagagagaagaaccagaaggaaattacgtccacattatccctgcaagaccattaatgtaatgaacagaaatcaaacaccttttcagtcttcaagtgccgcattcaggttcactctgctaatcacacagctgagtggccctctgctttcataactgggtgaaaccacacatcccaccccaagatggcttgggatctaccatcacaaggggccaccaaagggccaaataacacaaccccgaaattcagtggtggtaactctccatggggttaactttgattactgggaaactagaaatgggaaggagccagtaaattaatttcttctctcccaagactattctgaggcatagcctcccccttgaagcccatcaggatgatcctgcagttccatgtcagcaagagcgccctaccaagtgacctgcagtgtctcttggctgctccttgtgagtcagtagccagcagagaaatgttttccctactttcctttatttctttgttcttacttgcttcattttgccttgacctttttttcctcacccctactacccaaaggcatgtacttcccaaataaagtctgtcactctgatccctccctcagactgtttccagggatgctgagcaccctgtacattcagaaaagcagatgtcaaatttctgtatatatattggagtgcactaagtatttaaaatcaacctttggctattagaggtagggactgtgccttatgcatcattgtttttccagggcttagttcagtgtctgccatatagcaagtattcatttaacaggaaaagagaaagacaagtgggtaagtaattgcctgaatgaatgaggttgatggtgaagaatgggtgggaagggcatgaattggcctagaatagattagacattaagtaagcaggagtcgagacagttaaggggccaaaggcagctgaaaagaatatggaacaggaatacaagttgaaggaatcaggcattctccctagaaacaaagggtacgggaagggtaagagacagacacttcactgtctgggaattttcatccatactcgttattaaagacacacttggttgcctacttaattattaccaaccctccacccccactttattcctggcatacataagtgggattttgttcaggtcgtgtgaagtcaagtcttccagggagatccagcctctcctcagttctgtaggctaattctgagccttttatggtaattcctctacccttgccagtgattaggttaggacaggcttgccgtgctgcaatagtagacagtgagacacaggttgacttctgggaaaatatccccaactcttacaaagaaaagagagaacagaacattttttcttcggggctttggaaattattttcaaagatgtcatggttaggctattatcttgaggccacgaaaggaactatctgaatacacagacaacatactgaaaatggcaaagcagaagttagatagcacatgagtctttgaagatgtgtttgagctgctgaactaatcagccctactttgaaacttattaagataataactagttattatttaagccattttagttgaacctgctattatttgcccctgaaacaatcctaactaatatactgttagtccatttgtatcgttataaaggaatacctgatgctgggtaatttataaagaaaggaggtttatttggctcagagttcttcaggctgtacaggaagcatgcacggctctacagctgcctggcttctggtgaggcctcaggaagctttaactcatggcagaaacaaggggagctggcgtatcacatagtgggaggaggtggcaagtaggcagggaggaggtgccatgctgttaaacaaccagctccttcatgaatagagtgaaaacttatacattactgcaaggacagcaccaagtggatcatgaaggatcgtgacccaaacacttcccaataggccccaccttgaatattgggggatcaatttcaacatgagacttggagaatacaaatatccaaactatatcatacacccactctttgttccaacaatgtgctggtgagtctgggctgggartgggggagaaaggtacctggcacagtggaaatgttggaaatttgaccccaaattagctgggtgaccttaggcatgttaattcatctctactttctttcattttaaataggggaattataatattggaatcttctctacattcttcacagtattagagcaaatgaatttataaatgtaaactcagtgtaaactttagataaaatttttcaaacactaagcttgtgacccagagtagataataaagtcaaaagatggttgccatgagcactaaccgtgaattaaaatagaatagagaatatcactgtgtgctgcacataagtttcattttctgaaattgcttcatttacatgcatgcatgggtgcacttgtgtgcttgcacacacatgcaaatgttgccaagtaaactatttttaaaagcatacgaagcatggatttagaacaaagtcaacaccagagacaactagaggaacctaagtctctcaccaacccccacccctgccaatttacctgtcatccatgattcaaaaatggtttctaaagggaaataaaaattgattcaaaagggagacctaatgagtaacataatagggagccattgattgttttagagtggtatgacggagcagtgggtaagtagatcactcaacactggtatttcagactgccaagagaggagaaaacagacacaaagtgatttctgggcttttgacaactttttttttctcaaagtagattgacaatattatgtgtcatcttatatatattaatagacaaaggcaatatctacacttgggaatacttcatggaaggcttggctggaaactaaaaactggactataaacttcttgggggttagatacgtatcttaagacttccttgtgtcttgaattgtgcctagcctagtgctgcatagatatgtaagccactcattcttgtgcaattacctattgtagaattttcagactaatatatttccttttccttgttttgatcctctgctgaatcatgagaatagttctcaggtgaacagcagtgatgtacagtgtctcactggaaaagcaggaaaataatcagatgtaccccagaaccttaggatatgggaggctcttctactggccactccatgggaaactcgcttgctttgggggacagtttgctttgctctattttgtgggcacagggttttgccttatttttctactcccttattcccagcaaacatcctaaaaagatgtgggtaaaagaaaaagagaataaattttgcaattctactcactggctagaaacagacagagacacatgagtagaggcggagtttaccatcacccttaatcatcctggggcccatgtgtgtataaaaggcaagaaaagagccattaccaggaggcactcaccttcacagtttccaccgcataattccacccctctgtatcaaactacccaaattgctacaccaatcacaactgccctcttgttcaaagaaaataatatcatggatttctttcctggcagttctgctattgattgtttttgttcttttaataagcaaggtgagaaggttagaaaaaaattattcagataattcacctgggagtagggtaggaacttgaggcatgcagagagaatggcaaattcaaaatcaactaagccataactgcctatcctactgaccactgtgccaggtacctcaaaagagtaggacttgattcttccttttgaggaggtttcagtttggttggaaaggaatgggggaggggccaagtacagtggctcacacctgtaatagcagcactttgggaggccgaggtgggtgaattgcttgagcccaggcatttgaaaccagcctgggcaacatggcaagaccccacatctacaaaaaatacaaaaattagctaagcatgatggtgtgcacctgtagtcccagctactcgggaggatgaggtgggagaatcacttgagcccaggaggttgaggctacagtgagctgtgaacatgcttctgtgctccagtctggactacagagcaagactctgcctcagataataaaaaaataaaaaaggaaaaaaaaaaaagaaatggggaatggaagaggaaggaatccaggggaagaatgatcactaagactgcatcacaccttttgctatctcatttcaactctacatcaacccaatattcccttcatttaacagagaggtcaaaagaggctggaaggataaggttgtccagtaaaaatgtcaaggctgatatgggaacatagccagtttgtctctaaagtgccctgtgtcccttggggaagagaatatttaacttgattgttgcttcagttttttattctatgtcagctatcagtttgcaaggcattatttaggggatttcctttactttctttttttttaaatctcaaatttccctctcatttagtaactgtaatttcagtgcctaacatgtaggacaaaatactttccatatttttttttcaaaatttttgcactgactgtagtcccctcactggaacagctttatttccctaaataatatacaatgaacttgttcatatcgaagacgtatgccaatattaaatacaaacagctcagctgggcgtggtggctcatgcctgtaatcccagcactttgggagactgaggcaggtggatcacctgaggtcaggagttcaagaccagcctggctaacatggagaaaccctgtctctaataaaaatacaaaaattacccaggtgtggtggcacatgcctgtaatcccagctactcaggaggctgaggcaggagaatcacttgaacccaggaggtggaggctgcagtgatccgagattgtgccactgcactccagcctgggtgacagagcaagactctatctcaaaaaaaaaaaaaaaaaaaaaaaaggtggctgaccagatggccaaaaggaacagctccagtctgcagctcccagcaagatcaatgcaaaaggtgggtgatttttgcatttccaactgaggtacccagcttatctcattgggactggttagacagtgggtgcagcgcatggagggcgagccgaaggagggtgggccattgcctcacccaggaagtgcaaggggtcaaggaattccctcccctagccaagggaagccatgtgggactgtgccttgaagaacagtrcacttcggcccagactacacttttcccacagtcttcgcaacccacagaccaggaagttcccttgggtgactatgccaccagggccctgggtatcaagcacaaaactgggcagctgtttgggcagacaccaagctagctgcaagagtatttttcataccccagtggcacctggaatgccagcgagacagaacagttcattcccctggaaagggggctgaagccagggatccaagtggtctagctcagcggaccccaaccccacagagcccagcaagctaagattcactggcttgaaattctcactgccaccacagcagtctgaagtcaacctggggcactcgggcttggtggggggaggggtgtctgccattactgaagcttgagtagactgttttcccctcacagtgtaaacaaagccaaggggaagttccaacttggtggatccctccgcagctcagcaaagccattgaagccagactgcctctctagattgctcctctctgagcaggacatctctgaaaaaaaaggcagcagccccagtcagggacttatagataaaaacccccatctccctgggacagagcacccaggggaagcagcggtgggcacagcttcagcagacttaaacatccctgcctgctgggtctgaagagagcagcagatctcccaggacagcgttcaagctctgttaagggtcagactgcctcctcaagtgggtccctaacccccattgtagcctgactgggagacaccacccagcaagggttgacagacacctcatagaggagacctctcgctggcatctggcgggtgaccctcagggacaaagcttccagaggaaggagcaggcagcaatttttgctgttctgcagcctccgctggtgatataggtaaacagggtctggagtgggcctccagcaaactccagcagacctgcagaagaggggcctgactgttagaagcaaaactaacaaacagaaaggaacagcaatgacatcaaccaaaaggatgtccacacaaaaactccattcgaagcttaccaacatcaaagacccaaggtagataaatccatgaagatgagaaaaaaatcaatgcacaaaggctgaaaattccaaaaaccagaatgcctcttctcctccaaaggaacagaactcctcaacagcaagggaacaaaactggatggagaatgagtttgacgaattgatagaagtaggctttagaaggtgggtaataacaaactcctctgagctaaaggagcatgttctaacccaatgcaaggaagccaagaacgttgaaaaaaggttagatgaattgctaactggaataaccagtttaaagaagaacataaatgacctgatggagctgaaaaacacagcatgggaactttgtgaagcatatgcaagtatcaatagccaaatagatcaaaccaaagaaaggatatcagagattgaagatcaacttactgaaataaagcatgaagacaagattagagaaaaaagaaggaaaggaaacaaagcctccaagaaatatgagactatgcgaaaagaacaaacctacatttgactggtgtacctaaaagtgatggggagaatggaaccaaaagttggaaaacactcttcaggatattatccaagagaacttccacaacctagcaagtcaggccaacattcaaattcaggaaattcagagaacaccacaaagatactccttgagaagagcaaccctaagacacataatcgtcacattcaccaatgttgaaatgaagaaaaaaatgttaagggcaaccagagagaaaggttaggttacccacaaaggaaagcccatcagactaacagtggatctctctgcagaaaccctacaagacagaagagagtgggggccaatattcaactttcttaaagaaaagaattttcaacccagaatttcatatccagccaaactaagcttcaaaagtgaagaagaaataaaatcctttacagacaagcaaatgctgagagattttgtcaccaccaggcttgccttacaagagctcctaaaggaagcactaaacatggaaaggaaaaaccagtaccagccactgcaaaaacataccaaattgtaaagaccatcaacactatgaagaaactgcatcaacaggcaaaataaccagctagcatcataatgacagaatcaaattcacacataacaatattaaccttacatgtaaatggactaaatgccccaattaaaagaaacagactggcaaattagatagagtcaagaagcaacggtgtgctgtattcaggagaccgatctcacgtgcaaagacacacatagactcaaaataaaggattggaggaatatttaccaagtaaatggaaagcaaaaaaagcaggggttgcaatcctaatatctgataaaacagactttaaaccaacaaagatcaaaaaagacaaagaagggctttacataatggtaaagggattgatgcaacaaaaagagctaactatgctaactctcctaaatatatatgcacccaatacaggaccacccagattcaaaaggcaagttattagagacccacaaagagacttcaactcccatacaataatagtgggagactttaacgacccactgtcaatattagacagatcaatgggacagaaaattaataaggatattcaggacttgaactcagttctggaccaagcagacctaatagacatctacagaactctccaccccaaattcatagaatatacattcttctcagcaccacatcacacttatyctaaaattgaccaacagaattggaagtaaaatactcctcagcaaatgcaaaagaatggaaatcataacaaacagtatctcaaaccacagtgcatcaaattagaactcaggattaagaaactgacccaaaactgcacaactacatggaaattgaacaacctactcctgaatgactactgggtaaataataaaattaaggcagaaaataagttctttgaaaccaatgagaacaaaggcacaacataccagaatctctggtacatacccaaaatagtgtttaaagggaaatttatagcactgaatggccacaagagaaagcaggaaagatctaaaatcgacaccctaacatcacaatgaaaagaactagagaagcgagagcaaacacattcaaaagctaacagaagacaagaaataactaagatcagagcagaactgaagtaaacggagacacgaaaaatccttcaaaaaaaaaaaatcaatgaacccacgagctggttttttgaaaagatcaacaaaatagaccactagccagactaataaagaagaaaacagagaagaatcaaatagacacaataaaaaatgataaaggggatatcaccactggtcccacagaaatataaactaccatcagagaatactataaacacctctctgcaaataaattagaaaatctaaaagaaatggataaattcctggacacatacatacaccctcccaaatctaaatcaggaagaagttgaatccctgaagagaccaataacaagttctgaaattgagacagcaattaatagcctaccaaccagaaaaagtccaggaccaaacagattcacaacagaattctacttgaggtacaaagagctggtaccattccttctgaaactattccaaacaatagaaaaagagggactcctacctaactcaatttatgaggccagcatcttcctgataccacaacctggcagagacacacacacacacacaaaagaaaatttcaggccaatatccctggtgaacattgatgcgaaaatcctcaataaaatactggcaaaccaaatccagcagcacatcaaaaaccttatccaccatgatcaagtaggcttcatctctgggatgcaaggctagttcaacatatgcaaatcaataaacataatccatcatataaacagaaccaatgacaaaaaccgcatgattatctcaacagatgcagaaaaagccttcgataaaattcaacaccccttcacgctaaaaactctcaataaactaggtattgatggaaggtatctcaaaataataagagctatttatgacaaacccacagccaatgtcatactgaatgggcaaaagctggaagctttccctttgaaaaccagaacaagacaaggataccctctctctctattcctattcaacacagtattggaagttctggccagggcaatcaggcaagagaaagaaataaagggtattcagataggaagagaggaagtcatattgtctctgtttgcagatgacatgattgtatatttagaaaactcatcatctcagcccaaaatctccttaagctgataagcaacttcagcaaagtctcaggatacaaaatcaatgtgcaaaaatcacaaacatccctatacaccagtaacagacaaacagccaaatcatgtgtgaactctcattcataattgctacgaagagaataaaatacctaggaatacaacttacaagggatgtgaaggacctcctcaaggagaactacaaaccactgctcaaggaaataagagaggacacaaatggaaaagcattccatrctcatggataggacgaatcaatatcatgaaaatggcaaaatggccatactgcccaaagttatttatagattcaatgctatccccatcaagctaccgttgactttcttcacagaattagaaaaaactactttaaacttcatatggaaccaaaaaagagtctgtatagccaagaaaatcctaagcaaaaaaaattaaagctggaggcatcacattacctgacttcaaactatactacaaggctacagtaacaaatatagcatgatactggtaccaaaacagagatatagaccaatggaacagaacagaggcctcagaaatcacaccacccatctacaaccatctgatctttcacaaacctgagaaaaacaagcaatggggaaaggattccctatttaataaatggtgttaggaaaactggctagtcatatgcagaaaactgaaaatggacaccttccttataccttatgcaaaaattaactcaggatggattaaagacttaaatgtaagacctaaaaccataaaaactctagaagaaaacctaggcaataccattcaggacataggcatgggcaaagatttcatgactaaaacaccaaaagcaatggcaacaaaagccaaaatttacaaatgggatctaattaaactaaagagcttctgcacagcaaaagaaactatcatcagagtgaacaggcaacctacagtgggagaaaagttttgcaatctattcacctgacaaagggctactatccagaatctacaaagaaattaaacaagtttgcaaggtaaaaaacaacctcatcaaaaagtgggtgaaggataaaaacagacacttctcaaagaagacatttatggagccaacaaacatatgaaaaaaagctcttcatcactggtcattagagaaatgcaaatcaaaaccacaacgagataccatctcatgccagttagaataatgatcattaaaaagtcaggaaacaacagatgctggagaggatgtggagaaacaggaacacttttacactgttggtgggagtgtaaattagttaaaccattgtgcaagacagtgtggcaattcctcaaggatctagaacaagaaataccatttgacccagcaatcccataactgggtatatacccaaaggattataaatcattcaactataaagacacatgcacacgtatgtttattgcagcactgttcacaatagcaaagacttggaaccaacacaaatgcccaccaaggatagactggataaagaaaatgtggcacatatacaccatggaatactatgcagccataaaaaggatgagttcatgtcctttgcagggacatggatgaagctggaaaccatcattctcagcaaacacaagaacagaaaaccaaacactgcatattctcactcatatgtgggagttgaacaatgagaacacatggacacagggaggggaacatcacacactggggactgtcgaggggtggggggctgtgggagggatagcattaaggagaaatacctaatatagatgatgggttgatgtgtgtagcaaaccaccatggcatgtgtatacctatgtaacaaacctgcacgttctgcacatgtatctcagaacttaaagtataataaaaactcaaacagctctacattgttatttatttaaaacttcaatttacttgctaagaattatcttttttttttcattctctcttcacttctctcaccagcaatggcatttgggtttttttaaggccactttaaaagacattgaaaataatacctgtttgttttcattctattattcttattacattcatttgtctttgaatgttcccaagttttctggtatgacactacgaatctaagttattccagacttctctattctttcatgtatttagaatacatttttcaaaattcctaggctgaggtattaataacttgcccaaattacctttcaaaatgtatttaccatccctgtattactcagtacaaaaatttgattttttggagacatatttgtacatatttatgggatacatgtagtattttgttacatgcacagaacatgtaatgatcaagtcaggctatttgggctattcatcacctccattattgattatacctatatgttgagaacatcttaagtcctcttttatagtaagtttgaaacatataatactatactatagtcaccctactctgttattgcatattagaattttttccttctgtgtgtttgtacccattaaccaacctctacttcattcaccccccaccacccacacacccttccaatcctctggtgtctatcattctattctctacttccataagatccacttttttagctcttacatatgagtgagaacatgtgatattcttctttctgtgactggcttatgtcacttaagataatgacccttcagttctatccaagttgctgtaaatgccatcatgttagtcttgtttatggctgaatagtattccattgtgtatatatatatattctttaaccattcatccatgatggatacttacgttgattccttatctttgcaattgtgaatggtgctgcaataaacatgggctgcaggtattcctttgatatattaatttcctttcctttggataaatactagttagattactggactgtatggtagctgtttttagttttttgagaaatctccatactgttttccaaaatggctgtactagtttacattcccaccaactcccaccaacaagaattcccttttttctgcatcctcaccagcatctatatttcgtcttcatcttctccttctccttctttgacagggtcttgctctgttgcctgtttcccaggctgaagaacagtggtgattcacaggtgcaatcaggatgcactgcagccttgaactcctagccttaagcaatactcctgcctcagcctcatgcgtagctgagactacaggcatcagacttttgtctttttagtaatagtcattttaactggagtatgatgctatctcattgtgattttaatttgcagtttcccgatgattactgatgttgagcattttttaatatgcccatttgtctttttttgagaaatatctattcatgtcctttgcccatttttcttcttaggcagagtctcattctgttgctcaaactggagtgcagtggtgaaatcgtggctcacagcaacttctgcctcctaggctcaagcaattctcctgcctcccctccccagtggctgggattacaggcgcccaccaccatgcccagctaatttttgtattttagtagagacggggtttcaccatgttggccaggctggtctcaaacttctggtttcaagtgatccacctgcctcagcctcccacagtgctgggattacaggtgtaagccactgcacctggccctttacccactttttagtaggatgatttgtggtcttttactgttgagttgtttgagttccttgtatattctggatactagtcccttgttggataaatatcttgtaaatattttctcccattcaacaagctgtatcttcagtctgttggtttcttgtgtagaagaatttttagtttaatatagtcccatttgtctatttttctttttggtgcctgtgatctagagatcttagctataaaatctttggtcagactgatgtcctgaattgttttccctatgttttcttgtagtagttcataattttgggtcttatgtttaagtccttaactgatttgagttgatttttgtacagggtgagagatgggtccagtttcattcttctgcatatggatatccagttttttctattccatttagtgaagaaagtgtcctttcctcagtgtatatacttggcacctttatagaaaatcagttggtggtaaatgtggtatatgctggcatcagtgttagtgtgtccaggcgggctgatctgggggcttccagtcagcttgctgaggtgctggcaatggcagctgtgggccaggtggatgggcaggtccataggccctgggcatcaggcatggtgtgggtgatggcagttgcagtggcaggacaatcctctggtacccaagtagtcccaactgattttcaaggtggctgcaggccatttcccaggcccacaggtggttcatgtctgtgggtggggggtgtatgctggctgtgatggtagtggcaggttgggtgaacccatctccaggccttcaggatgagtgctcaggcgccaacaggaatagatggggctgagcaatccccaggcccctgcatgggcactagggagaagggagacagaggtgagcctcaggccccccgatggtatatataggcactagctatggtaggcaggggcatggtgatttccaggccctcagtggaatgcttggatgggaggaccagcagctacaccctagccatgttgctggggttgctttcattggcagaagccttaggagggccactgggagcacacactttggccccaggtggtagttgctggtggggtagcctgttctcagggtgcttctaaatgtacggtaccctgctgatggggatggtgggtagcttccagtggcccccacattggatatggaggcagcagccagcagcagcagggtctgcgttagggggaggtcaatggggctcaaggaatctggagttgcaaggtctgtggggtcccagggtaggatgcagtctgctgggctttcaaaatggtaccttgctggagtgccttaagagtggggtaagagggagggtgggtggggtgacccagtgtgagctccccatatgaagcaatgccatcatggggtctccagccagtgccctatgtcctagcaattcattctttgcgctcctggcattctcaaatgttttgtagatgccttcttgtagcagccagtctcgtcccttttcttgaagtcaatgagcatcaaatgtgttcaggattcatgaaataattctgacaataattagtattttttataggaattggaacatggtttattgcagtataccgcagtgtttgtcagctctagaacttacgaagaagaggaagaggagaacaagtttgactcctgtgaacgtttttccttttttctcagggcttgtgtgggtcaaaggactctccagtggctaggattgcaggagtccatggtaggaaggtgggccactgggggctactcacctactctttcctcacattagggagccccctccagactccctgctaatcccagctgagcaggctacttcactttcctcttgtttttcatgctaggtgtcacttccgtgttgaattccagccttctctcttaggtgatctatttttattttacaagttagaaatataagtgcagagaagttaaaacagcaaatctgtggcttccaagagtggcaaagcagtttctagcctatgttggctgagttttgaccaagcctctgatatgcatacacatatatacatgttcatgtacgtgtacttaaaacatttttattcccatgtttaaggctagttgaataggggtgaacacagaaaatcctagcaattcattctttgcactcctggcattctcaaatgttttgtagatgccttcttgtagcagccagtctcgtcccttttcttgaagtcaatgagcatcaaatgtgttcaggattcatgaaataattctgacaataattagtattttttataggaattggaacatggtttattgcagtataccccagtgtttgtcagctctagaacttacgaagaagaggaagaggagaacaagtttgactcctgtgaacattttccttttttctataatttacgcatatgctaacaagcagctagtttcaaaacacaaacttaccttgacaggaactaggtctcactgttgagaatgtagtctcctctctccccacatagccctagggttattcaggatgaaggagaagaaaaaacatacccaagagcattttataattccatccttccttcttgttatgctaaggttactagtaccatgacctatgtgaactcgttttcttgaataagaagaataaaagcgttccgtccatcaaggaagacctcaagagaaattccaggttcaggtctcatggtacaagagccaagtgtttcttcctgaatcattcccaggcctgcttttgatctgagcagtggctttcaaaaaatatgctgatgagattgctctctcacttaagaacttaagaaagagttgaagttcttcaatgtatatccccagcctgaaacttgtcttgaggaagatttgtagtagtaatgaagggtgacagtaacctaagggtgaagaatgtagagagatttttcccaagagcaatccaagatactgcttgaaacatccggggtccactgacatgccccttggactccaggagaaatctggaaatgtctggacctgcaatgagacacacccagcttcaaatgtgtcactctgggcatattctttaatctgagctccaattttctttcttgtaagagtcattacacatggctgttttatttactaattcgttttttaaattaaagaaataaatttgtaggagtaatatagttacattgtttacaagtcaaattcttacatggctcatttccatccatttcatggatgtgttaccttctggtatttattagaatttgctttagactttctgttgctcacctcacagttcttgtgtcatcttagtttcttttctgttttttggtcttttatgcgagaggttttcctcacattgtctgataatccttggcagtcagttcgtattgaagagttagacattagaaagccaagtgaaaatcctgtgtgtgtacaaggtttgttgactggaaagcttcatggggatattcttgcttggacatttcactgaaggacatccaaaaacctgttgccgtttttagattttttttcttggattgttggttttcctggtgatcttactccaatctctttggtgccataattctaccagctgagtatgagaaggagctggggtttctcaatgcagaatatgtacttggttctaatatggtagtctggttctaatattgtagcctttttctcagcaatggttgccacatctgagtcctgaatccctttggaatcagcctctccagagggtgtatgtttagaaccggcgtgagtgaaaggtagtcatccaatgacatgaggtgggtgaaaatattttaactgctttatttataaattttcaactgaccctcctgtttttgaaacccaccagtgtccccacttccataagtccctggatcctcaattttccaagtcttcctggaattctatggagtaaattagcttactgatgcatttcccttacttgccttaggtttctgctcactctgttcccaagtcaattatgacctacctggctgcttccagtttctgaaatgttgtgtgtcagcttcttttccattgcctttgtccttgcaagcttatgccattttaaaaaattcttttgctgtcgtttttgtggagaaatagaaaaatatgtacattcaatccccatgtttaagtggaagtccctcataaaattatattagaaatttattagaaatatatacacacatatgaatatagatagatatacactctcttttttagcatacatagtgcctgttatttagcaggtactaaaaaataatatgtatatgtatatacatgtagcagaaggctaacaggaacttagatacactcaggaatatatgatagcatggaaggttggaacggtgggcctgtgcacaatcaagtcatgaggacttagaaaaagacggaaccatggctgggtgcggaggctcatacctgtaatcccagcactttgggaggccgaggccagtggattacctgaggtcaggagttcaggaccagcttggccaacatggtaaaactctgtctcttaaaaaaaaaaaaaaaaaaaaaaaaaaatacaaaaattagccaggcatagtggcaggcgcctgtaatcccatctactcgggaggctgaggcggaggttgctgtgagccaagatcgcgccattgcagtccagcctgggcaacaagagcaaaactcagtctaaaaaaaaaaaaaaaaaaaaaagaaagaaagaaaagagaaaaagaaaaagagaacctggcaggattcagtaattaagccagagtcagaaggagaagtacttctcaatacagcatggtatcttctgttttttagacacggctctacccagctcaattgattcatgactgtgtgggtgtattttgttttgttttttctttttcagactttgtcaacaggaagtaggtgcccatgttgttgatagaaaagtttgtaagtaggactgcacagacttggttttggttcagcatttggcaataatcagtctttctgcttcagccttcagagagcccacttcatcattctttctggcatccctgtgatcatatgattacatatctaatcagtgtaacaacaacagctacttaaagaaggcatgccattaaagatattgttaatatctctacattgcctttcaaacatatgtaagcattctaacttggagtgaaatcttcttaggtgctttatatgttgaaattctaccagtcagctgaggaagaaatgtatacggcttatccccaaaataagatattccaacaaataatgtttatgagagctgttaatttatgttaaaaaaaaaagctattaataaaatgtttaagtaattaaatttgggagcttgattggcagtaggaatattaagaggattagctagataactaatgtagaaaataatataattgtattgagtcaacaaaagcttatatagatttaattactatgatgatattagattacttcataattagaatctttgtagaattgttttggtataattgcattcacaatactcaaaaagtaagcttaaagaatgatatttttaattatttaattccagtaagtcataagtcttattttttgcattatatgaggctgaattaaaagcagaatgccatctgacatttcaaaatttcatggagagaaatgtatctgaaatcatatacaccaaaaagataagtaaaatttgatagaaaaaaatgaatgtattttagctgagttctgacatgcattttattcacaaatcaaacttcagaacacagaagacaatttcttattttgaatttatagagactattctaatattaaattgatttttacaagctagcaaatattttcaatagttgaagcttcggagtttctcatttatctaagctatgtaaatgcatgcaaagtttcttctagaaaacaaattactgaaagacattttcctgatttgtatttggctgtgttattccccagaaggtgaaattattaaacatgccattcgaaagccagtaactccttagtacaggttgaacatccctaatctgaaaatctgaaatctgaaatgctccaaaatctgaaactttttcaatgccaacatgatgccacaagtagaaaattttacacctgatctcatgtgatgggtaccaatcaaaactttgcttcatgaacaaaactattttaaaatatgtataaaattatcttcaggctatttgttaggaaataaaaataaaactctaagtccctccgactgacccagcggattctctcttggccaagggaaccccagcaaaaccttggaagctgaattcatggctatgatgggatgggagatttggcatatgcctcattatatccccaccctcgctaacagtcgttaggttttcttccttaacagctaaacagaaaccagcctttccaaaagactactagcttatcttcccagatacgtaacagtccagatgagattcattatgttcaccttattttatgtaagatgtagatttaccaggcactaactaaagttttacaagtatgtaatcatttgtctcactgctgccccaccacctcccctgccttttaaggaaaatatataaatactaaacctcctaagaacctctttggaaaaaacagtcacacatgcttctgtgactctctattttcccaggtatgccttcaagctggctcaacaaagcttgatgctttgaaacttatgcttcaattactcatttcagttgtcagtgtaaaaggtgtatatgaaatagaaaagaattctgtgtttagacagttctcatcagtgagatatctcattgtgtatatcccaaaatatttcaaaaaaatgaaatccaaaacacttccagttccaagcatttaggacaagggatattcaatctgtatcagaaacatgcgatggtgaccacaaaaggaatctggcagctgaaaattctgagtcactatcatgtcaaactataaaaattttatacaacttaaaaaaaaaacctgcactaatcattaatttatattattgttaaaattatcatacagtaaaattgattttttttccttttgatgtacagttctgaaaccacctttgcaaaaattgcaacactgagaaaactttgacagtgaaagaaatttgacctaaccaactccacattgcctttaacctccaaactgcccttcattcctgggcatggcctaagctaactttgggagaaatttaggttatagtttaaatgataatagctctttccaaaactaaactgcctttgtaaaactaatgaaaggccaccagtttacgaagataggagggcctgaattctgctaagatataggcatagttaagtgattaccagccattattccagaggtcacaagattttcaacttcctcaattactcctgtaaataacgttactattgtagaacctaaaattactattgtagaacctaaagttgaccttttgagatgtcttgtcaggcttttgcatttctgatgacmccagtgtcctgaaccagtgactcctctgtggacccttactggaagctgactcagggcacacgaggaccattttccacacccatatgattgcatccccaaccaatcagcagcacccattcctttgcccaccaaattactcttgaaaaactctagcctccaaattttcagggaggctgatttgggtaataataaaactctggtctcctgtttagctggctctatttgtattaaactctttctctactgcaattgccctatcttgataaatcagctttatctgagcagcaggcaagaagaacccattagacagttacagttctgtaaattttaacacaaacattgttcatgtaaccaccagtaggatcaccatctggatcagtttcaccacctaaaaagcttcctcataataccctactccatgacactaggaacagctactagttctccatcccaattgtttcatcttttgagaagtttatataaatggaattgtatagtataatcatcaattttaaaataaaatttcagatgtattcacattccataagtgtactctatgatgctgatatttatctttagcctcagcttatgccaaactatgcctttccatatatggccaaaatgtgtattcaatatacctctaactgggaggatcaattgaaagtgttgttttactaaactctataacacaaaggaattcaaggataccatagggatcattcaactgattataacacaaaatggggagagccaatttccctgtccccagagacctctgggcagctctagctccctgagggasscagcacaacagtggtccctttctcaggagatacctgggacaccaggcagttcctcttagaccttctgggagaggggttcccagcagacgctggataggagcaatagcactgagaaggggtagcagaagcagcagtggccttgacttgtgtatgtgcacatatgcaaggagcccttgcgagactcccttctccccaggtagtagggtcttgcttgccttgctagtggcaagaaccactaaagtttagttgttactgttaacgtaaccctatttctacttacaatgtggtgaggccttggaaaacccaagttatataaacatttgtcttagttcatttaggctgctttaacaaaaataccataaactgggtggtttataaacaacgaacatttatttctcacagttctggaggctgagaagtccgagatcatgctgccagcagattcactgtctggtgtggtcccatccctacacagtgaaagcagcaaggtcactttctgtgcctgatttataaggacactaatcccgatcatgaggactcaaccctcatgacctaatcacctatcaaaaagccccatcaccttagggtttaggatttcaaaatatgaattttgggtagacacaaacattcagactgcagcaacattcaatagaggcaactcacctaccaggaggcaacttttcattctgatgcccaggtatgacagacctcaaatctgttaccgtcccatgaaccaggaattatacaaagggtagaggggcatagctctgggtgaagagctgcactctgttcactctgggctctgtgtggtggtgtcccaggtagtgtcagtccagctgttaagtccagtgaggctcagaaaggtgatgtcatttgttcaaatcttccagctagtttgttggtcagatcataaccagaccctatgaagtctaatcatacccagttctgtaggctttcctcttcaataggtccattcttatctctaactgagaccacctgcatcctcatagcttaactatcagtatggaaaacaaaccatctgtgtcactatgactttactatttgttcaagaaaattcttgtccaggaagataagacggtgtacaataaataacatcaatgtttacttcagaaaatttctgaaaaccaatttattcagatgatagattgctcatttgaaaaaataaaccccttttcaggacaacagattcctctccaagtctaataacttgtttatcaaagatctatttttcaggacttcaagaccctcttatcacaatgtccaccaattctaaactataatatcatgaactttgccgaatttccaccagatttcttccttgaaaggcctgactttaaaccacttgagctcagacccttaatgtttataaatatctacctgtgacctctcccttttgagaattataaggactttttcaaggtgttgcactctcttactgcaggttaataaacttagctttgtttgatcaatagtttattctgatggtcttctttgaaagtcagcaatcaacagttctggggcctcagtaggattcactcaataatttctgctcctgcagtttaagaaccttagccctaaacagtgtgttcttctgaagtttgccatttggaagcctcccccactgcagtgttaaggtaagtctctcattggatttgagtcccggtgtcctttccataaagctcttaaattgtttatttttcttcctagaaataagaaacttttaagaaattcctggattatctgatcagatttgaaaatgtttattctttgtggaaatgttttattactagtaacattactctttttgtcttttatcctatttgttgtgagtctatgagaagaagctcacagggaagaagacagccgtagacctggcaattttgtcctcaaactggctcaaagatacaataatatcagcgggtctcatcaaactggcattcttatagaataaactttgctctgggtcacttactaatatcttacagaaaatttatagcagcagttgtatattgagggtgtgaataaaaaccaccagagaagctttttgaaaaaatactatgaatagatttctgcttctggccaaaatgaagaaacagggaccagatttactctccagtaaaccagtggaaaaaaaaacagacacaatattgaaaaataaaaagatttttcaagacatcaggcaatgaagaatagtgatccaagagaaacaagaaacaagatgaatcttatgttcgccacagcttactgtctggagtgagtatcaagactgtggtacagaaagggaaaacccagatggaaccctgccatctccctaagtggagtctggggagggcaaagtgagtagagtttgcaaggaaagatatgggaaaggagacagctgtgcagagagaacactggggatctgtacagggtcttcagctgagcatgagtcagcatatgcatgtgaggaaactacccatgactggggaaagaatcagctggaatgattacggggtatagaatccagggctcagaatcattcctgtttctataggaaatgggcattgagtagcatacttggaagaatttttgcttcagtcatgcagtaacatagaacttagactaaatactactctgataccacataatgaaactcaaaataagacccaaaagaatcaaactgtttataagtaactgagtttcaaaataaagttcaagaatatttatagaaataccatctaacaaagcacaaaattaagataaagggtcaaactatttgcaagtaattttaagtgtgttctagaacaaagttcaaaagtatttatagaaatacaaaaggatccaaaaactgtccacaaaaatatgacccataatgaagagaaaaatcagtcatttgaaactaacccagaaatgacaaagatgatagaatcggcaaagacattagaagaactgtaattgtacttcgcatgttcaagaagccagaggaaagactgaacatggtaagcagaaacatggaagatataaaaagactaaaaatcaaactttagagatgaaaacattatgtgagatgaaaaacacactgagtagaattaaaggcaaattggaaatttcagaagactagtgactttaagaattgagagataaaaagtacacaaaatgagaaacagaagtgtgtcagtgagttatgggacaacttcaaactaatgcgtaaattgcagtccctgaaggaaatgagggatatgttggaaaaaaatatttgaaaaaataatggccaaaaatctcccaaagtttatgaaaaccacagattcaagaaggtcaacaaattgcttaaaaatagagaaagtctaatattaggatacaaggtcttgaccaggtgtggtggttcatgcctgtaatcccagcactttggaaggccgagtgggaggtgaatcacttgaggtcaggagttcaagaccagcctggccaacatggtgaaagcctgtctctactaaaaacacaaaaattagcccggcgtggtggtgcacactataatcccagctactcgggaggctgagacaggagaatcacttgaacacaggaggtgcaggttgcagtgagccgagatttgtgcattgcactccagccctgggtgacaaagtgagactccgtcttaaaaaagacaaaaacaaaaacaaaaacaaaaaaatggaaataaggtctcaaattaataacttcagcttacaccttaaaaaaaattagaaatatcatt

SEQ ID NO: 2 - protein, 809 aa, Homo sapiens
MEAEGSSAPARAGSGEGSDSAGGATLKAPKHLWRHEQHHQYPLRQPQFRLLHPHHHLPPPPPPSPQPQPQCPLQPPPPPPLPPPPPPPGAARGRYASSGATGRVRHRGYSDTERYLYCRAMDRTSYAVETGHRPGLKKSRMSWPSSFQGLRRFDVDNGTSAGRSPLDPMTSPGSGLILQANFVHSQRRESFLYRSDSDYDLSPKSMSRNSSIASDIHGDDLIVTPFAQVLASLRTVRNNFAALTNLQDRAPSKRSPMCNQPSINKATITEEAYQKLASETLEELDWCLDQLETLQTRHSVSEMASNKFKRMLNRELTHLSEMSRSGNQVSEFISNTFLDKQHEVEIPSPTQKEKEKKKRPMSQISGVKKLMHSSSLTNSSIPRFGVKTEQEDVLAKELEDVNKWGLHVFRIAELSGNRPLTVIMHTIFQERDLLKTFKIPVDTLITYLMTLEDHYHADVAYHNNIHAADVVQSTHVLLSTPALEAVFTDLEILAAIFASAIHDVDHPGVSNQFLINTNSELALMYNDSSVLENHHLAVGFKLLQEENCDIFQNLTKKQRQSLRKMVIDIVLATDMSKHMNLLADLKTMVETKKVTSSGVLLLDNYSDRIQVLQNMVHCADLSNPTKPLQLYRQWTDRIMEEFFRQGDRERERGMEISPMCDKHNASVEKSQVGFIDYIVHPLWETWADLVHPDAQDILDTLEDNREWYQSTIPQSPSPAPDDPEEGRQGQTEKFQFELTLEEDGESDTEKDSGSQVEEDTSCSDSKTLCTQDSESTEIPLDEQVEEEAVGEEEESQPEACVIDDRSPDT

SEQ ID NO: 3 - protein, 150 aa, Homo sapiens
MDRTSYAVETGHRPGLKKSRMSWPSSFQGLRRFDVDNGTSAGRSPLDPMTSPGSGLILQANFVHSQRRESFLYRSDSDYDLSPKSMSRNSSIASDIHGDDLIVTPFAQVLASLRTVRNNFAALTNLQDRAPSKRSPMCNQPSINKATITV

SEQ ID NO: 4 - protein, 745 aa, Homo sapiens
MAQQTSPDTLTVPEVDNPHCPNPWLNEDLVKSLRENLLQHEKSKTARKSVSPKLSPVISPRNSPRLLRRMLLSSNIPKQRRFTVAHTCFDVDNGTSAGRSPLDPMTSPGSGLILQANFVHSQRRESFLYRSDSDYDLSPKSMSRNSSIASDIHGDDLIVTPFAQVLASLRTVRNNFAALTNLQDRAPSKRSPMCNQPSINKATITEEAYQKLASETLEELDWCLDQLETLQTRHSVSEMASNKFKRMLNRELTHLSEMSRSGNQVSEFISNTFLDKQHEVEIPSPTQKEKEKKKRPMSQISGVKKLMHSSSLTNSSIPRFGVKTEQEDVLAKELEDVNKWGLHVFRIAELSGNRPLTVIMHTIFQERDLLKTFKIPVDTLITYLMTLEDHYHADVAYHNNIHAADVVQSTHVLLSTPALEAVFTDLEILAAIFASAIHDVDHPGVSNQFLINTNSELALMYNDSSVLENHHLAVGFKLLQEENCDIFQNLTKKQRQSLRKMVIDIVLATDMSKHMNLLADLKTMVETKKVTSSGVLLLDNYSDRIQVLQNMVHCADLSNPTKPLQLYRQWTDRIMEEFFRQGDRERERGMEISPMCDKHNASVEKSQVGFIDYIVHPLWETWADLVHPDAQDILDTLEDNREWYQSTIPQSPSPAPDDPEEGRQGQTEKFQFELTLEEDGESDTEKDSGSQVEEDTSCSDSKTLCTQDSESTEIPLDEQVEEEAVGEEEESQPEACVIDDRSPDT

SEQ ID NO: 5 - protein, 215 aa, Homo sapiens
MAQQTSPDTLTVPEVDNPHCPNPWLNEDLVKSLRENLLQHEKSKTARKSVSPKLSPVISPRNSPRLLRRMLLSSNIPKQRRFTVAHTCFDVDNGTSAGRSPLDPMTSPGSGLILQANFVHSQRRESFLYRSDSDYDLSPKSMSRNSSIASDIHGDDLIVTPFAQVLASLRTVRNNFAALTNLQDRAPSKRSPMCNQPSINKATITGLYNGIIAFL

SEQ ID NO: 6 - protein, 673 aa, Homo sapiens
MMHVNNFPFRRHSWICFDVDNGTSAGRSPLDPMTSPGSGLILQANFVHSQRRESFLYRSDSDYDLSPKSMSRNSSIASDIHGDDLIVTPFAQVLASLRTVRNNFAALTNLQDRAPSKRSPMCNQPSINKATITEEAYQKLASETLEELDWCLDQLETLQTRHSVSEMASNKFKRMLNRELTHLSEMSRSGNQVSEFISNTFLDKQHEVEIPSPTQKEKEKKKRPMSQISGVKKLMHSSSLTNSSIPRFGVKTEQEDVLAKELEDVNKWGLHVFRIAELSGNRPLTVIMHTIFQERDLLKTFKIPVDTLITYLMTLEDHYHADVAYHNNIHAADVVQSTHVLLSTPALEAVFTDLEILAAIFASAIHDVDHPGVSNQFLINTNSELALMYNDSSVLENHHLAVGFKLLQEENCDIFQNLTKKQRQSLRKMVIDIVLATDMSKHMNLLADLKTMVETKKVTSSGVLLLDNYSDRIQVLQNMVHCADLSNPTKPLQLYRQWTDRIMEEFFRQGDRERERGMEISPMCDKHNASVEKSQVGFIDYIVHPLWETWADLVHPDAQDILDTLEDNREWYQSTIPQSPSPAPDDPEEGRQGQTEKFQFELTLEEDGESDTEKDSGSQVEEDTSCSDSKTLCTQDSESTEIPLDEQVEEEAVGEEEESQPEACVIDDRSPDT

SEQ ID NO: 7 - protein, 15 aa, Homo sapiens
MMHVNNFPFRRHSWI

SEQ ID NO: 8 - protein, 687 aa, Homo sapiens
MAFVWDPLGATVPGPSTRAKSRLRFSKSYSFDVDNGTSAGRSPLDPMTSPGSGLILQANFVHSQRRESFLYRSDSDYDLSPKSMSRNSSIASDIHGDDLIVTPFAQVLASLRTVRNNFAALTNLQDRAPSKRSPMCNQPSINKATITEEAYQKLASETLEELDWCLDQLETLQTRHSVSEMASNKFKRMLNRELTHLSEMSRSGNQVSEFISNTFLDKQHEVEIPSPTQKEKEKKKRPMSQISGVKKLMHSSSLTNSSIPRFGVKTEQEDVLAKELEDVNKWGLHVFRIAELSGNRPLTVIMHTIFQERDLLKTFKIPVDTLITYLMTLEDHYHADVAYHNNIHAADVVQSTHVLLSTPALEAVFTDLEILAAIFASAIHDVDHPGVSNQFLINTNSELALMYNDSSVLENHHLAVGFKLLQEENCDIFQNLTKKQRQSLRKMVIDIVLATDMSKHMNLLADLKTMVETKKVTSSGVLLLDNYSDRIQVLQNMVHCADLSNPTKPLQLYRQWTDRIMEEFFRQGDRERERGMEISPMCDKHNASVEKSQVGFIDYIVHPLWETWADLVHPDAQDILDTLEDNREWYQSTIPQSPSPAPDDPEEGRQGQTEKFQFELTLEEDGESDTEKDSGSQVEEDTSCSDSKTLCTQDSESTEIPLDEQVEEEAVGEEEESQPEACVIDDRSPDT

SEQ ID NO: 9 - protein, 585 aa, Homo sapiens
MKEQPSCAGTGHPSMAGYGRMAPFELASGPVKRLRTESPFPCLFAEEAYQKLASETLEELDWCLDQLETLQTRHSVSEMASNKFKRMLNRELTHLSEMSRSGNQVSEFISNTFLDKQHEVEIPSPTQKEKEKKKRPMSQISGVKKLMHSSSLTNSSIPRFGVKTEQEDVLAKELEDVNKWGLHVFRIAELSGNRPLTVIMHTIFQERDLLKTFKIPVDTLITYLMTLEDHYHADVAYHNNIHAADVVQSTHVLLSTPALEAVFTDLEILAAIFASAIHDVDHPGVSNQFLINTNSELALMYNDSSVLENHHLAVGFKLLQEENCDIFQNLTKKQRQSLRKMVIDIVLATDMSKHMNLLADLKTMVETKKVTSSGVLLLDNYSDRIQVLQNMVHCADLSNPTKPLQLYRQWTDRIMEEFFRQGDRERERGMEISPMCDKHNASVEKSQVGFIDYIVHPLWETWADLVHPDAQDILDTLEDNREWYQSTIPQSPSPAPDDPEEGRQGQTEKFQFELTLEEDGESDTEKDSGSQVEEDTSCSDSKTLCTQDSESTEIPLDEQVEEEAVGEEEESQPEACVIDDRSPDT

SEQ ID NO: 10 - protein, 507 aa, Homo sapiens
MASNKFKRMLNRELTHLSEMSRSGNQVSEFISNTFLDKQHEVEIPSPTQKEKEKKKRPMSQISGVKKLMHSSSLTNSSIPRFGVKTEQEDVLAKELEDVNKWGLHVFRIAELSGNRPLTVIMHTIFQERDLLKTFKIPVDTLITYLMTLEDHYHADVAYHNNIHAADVVQSTHVLLSTPALEAVFTDLEILAAIFASAIHDVDHPGVSNQFLINTNSELALMYNDSSVLENHHLAVGFKLLQEENCDIFQNLTKKQRQSLRKMVIDIVLATDMSKHMNLLADLKTMVETKKVTSSGVLLLDNYSDRIQVLQNMVHCADLSNPTKPLQLYRQWTDRIMEEFFRQGDRERERGMEISPMCDKHNASVEKSQVGFIDYIVHPLWETWADLVHPDAQDILDTLEDNREWYQSTIPQSPSPAPDDPEEGRQGQTEKFQFELTLEEDGESDTEKDSGSQVEEDTSCSDSKTLCTQDSESTEIPLDEQVEEEAVGEEEESQPEACVIDDRSPDT

SEQ ID NO: 11 - DNA, 483 bp, Homo sapiens
atagttggcgtaccctgaggcctgccagttcctgccttaatgcatatgtagtcgtaattgagttctgacacggccttggatgtttctgtcctaaatagctgacattgcatcttcaagactgtcattccagttggcttttgagtggatacgtgcagtgagatcattgacactggaaacactagttcccattttaattacttaaaacaccacgatgaaaagaaatacctgtgatttgctttctcggagcaaaagtgcctctgaggaaacactacattccagtaatgaagaggaagaccctttccgcggaatggaaccctatcttgtccggagactttcatgtcgcaatattcagcttccccctctcgccttcagacagttggaacaagctgacttgaaaagtgaatcagagaacattcaacgaccaaccagcctccccctgaagattctgccgctgattgctatcacttctgcagaatccagtgg

SEQ ID NO: 12 - protein, 90 aa, Homo sapiens
MKRNTCDLLSRSKSASEETLHSSNEEEDPFRGMEPYLVRRLSCRNIQLPPLAFRQLEQADLKSESENIQRPTSLPLKILPLIAITSAESS

SEQ ID NO: 13 - DNA, 782 bp, Homo sapiens
ttctcactgccctgcggtgttttgaactgccttcttacagacgtcatacagcccttgaggaatagtttctgcctggtgagattgaatgatagttctcattcacaaaaccctggattctaagcagggacacacagaaattactttcgcaggtaaatcagcccacccagccaaagtgtggagagatttgttccttggctgacttctttgctccacggagaggagtgttttcctgtgcttgccctgaaatggaacttccttgacagctctcccgtgttacagtacctcccggtcattttctttttctctctctctacctgcgctcttcgagtgtcagaaacctttaaagctgttactatggaattgcaaaaaagagatcaagtgactctttcactatgctggtttcccttgtgacccagatgaagaatcaattcagaattcagttcctcccttggcattgcaagacacagaagaaactgtcacttcctaacagcctagtactggagtaaattcagtatgaaggaagaaagcgctcctgcgtgttagaaccttgcccatgagctggaccgaggacaggagatggactccaggaaaattggatttcttcaagcagcctcccttggaaatggaatatctttaaaatcttctttgcagaaagacagttagaatgtattaatcagaatagttgaagacttattttcctttttattttttttcaaaatgagcattattatgaagccaagatcccgatctacaagttccctaaggactgcagaggcagtttg

SEQ ID NO: 14 - protein, 21 aa, Homo sapiens
MSIIMKPRSRSTSSLRTAEAV

SEQ ID NO: 15 - DNA, 16 bp, Homo sapiens
agcctttgggccaaca

SEQ ID NO: 16 - DNA, 25 bp, Homo sapiens
caaaccaacaggagtatgtactttt

SEQ ID NO: 17 - DNA, 25 bp, Homo sapiens
aaatgaatggtagatttaacctgag

SEQ ID NO: 18 - DNA, 20 bp, homo sapiens
tgggaaaataaatacatgcg

SEQ ID NO: 19 - DNA, 25 bp, homo sapiens
ttataccaggagagtagactttttt

SEQ ID NO: 20 - DNA, 23 bp, homo sapiens
catgctaatttcaaatatgagag

SEQ ID NO: 21 - DNA, 17 bp, homo sapiens
gcatttgtcatgtgcca

SEQ ID NO: 22 - DNA, 22 bp, homo sapiens
ggtatttcattcacagccagtc

SEQ ID NO: 23 - DNA, 20 bp, homo sapiens
ttaaaggagtgatctccccc

SEQ ID NO: 24 - DNA, 23 bp, homo sapiens
gttacagtacctatggtcatgcc

SEQ ID NO: 25 - DNA, 19 bp, homo sapiens
gcactgtgaatttcaaatg

SEQ ID NO: 26 - DNA, 16 bp, homo sapiens
gtcaggggactgggat

SEQ ID NO: 27 - DNA, 25 bp, homo sapiens
cctgtaaacaatgaaaacccactga

SEQ ID NO: 28 - DNA, 23 bp, homo sapiens
agactatgctgtgtgtgtgcctg

SEQ ID NO: 29 - DNA, 21 bp, homo sapiens
tctgggtttacaaccttcaaa

SEQ ID NO: 30 - DNA, 16 bp, homo sapiens
taactggcttggcccg

SEQ ID NO: 31 - DNA, 25 bp, homo sapiens
cagtaaatagtttgcttcaggcatt

SEQ ID NO: 32 - DNA, 20 bp, homo sapiens
ctcatactctgcgtggcttg

SEQ ID NO: 33 - DNA, 20 bp, homo sapiens
agggctaagtggatcacagc

SEQ ID NO: 34 - DNA, 20 bp, homo sapiens
agagggtcttgccactgtgt

SEQ ID NO: 35 - DNA, 20 bp, Homo sapiens
tctgcaagactctcggtgct

SEQ ID NO: 36 - DNA, 24 bp, Homo sapiens
tgcagatctcatatttccatgttt

SEQ ID NO: 37 - DNA, 20 bp, Homo sapiens
tctgccctttgttcctcatc

SEQ ID NO: 38 - DNA, 20 bp, Homo sapiens
gtcaagggagtgatggcagt

SEQ ID NO: 39 - DNA, 20 bp, Homo sapiens
aaaatgactgcctcccacaa

SEQ ID NO: 40 - DNA, 20 bp, Homo sapiens
gggaaatcatactgccctca

SEQ ID NO: 41 - DNA, 20 bp, Homo sapiens
aaacatagccaccctgttgc

SEQ ID NO: 42 - DNA, 22 bp, Homo sapiens
tccaaagcccttagcttaatca

SEQ ID NO: 43 - DNA, 20 bp, Homo sapiens
gctccctggactgtggtaaa

SEQ ID NO: 44 - DNA, 20 bp, Homo sapiens
gccacattgctgtcacattt

SEQ ID NO: 45 - DNA, 20 bp, Homo sapiens
tttttcagggctgggtagaa

SEQ ID NO: 46 - DNA, 22 bp, Homo sapiens
tccaaaggaagtgaaatcagtg

SEQ ID NO: 47 - DNA, 20 bp, Homo sapiens
ctaacccatcctcacccaat

SEQ ID NO: 48 - DNA, 20 bp, Homo sapiens
tgtggcatacagggaagtga

SEQ ID NO: 49 - DNA, 20 bp, Homo sapiens
gtgctggaatttggctccta

SEQ ID NO: 50 - DNA, 20 bp, Homo sapiens
caaacatcattttgccttgc

SEQ ID NO: 51 - DNA, 20 bp, Homo sapiens
tcccaaacgatagctgttgc

SEQ ID NO: 52 - DNA, 20 bp, Homo sapiens
gaattaggacggtggctcaa

SEQ ID NO: 53 - DNA, 21 bp, Homo sapiens
tttgcattcatcactcattcg

SEQ ID NO: 54 - DNA, 20 bp, Homo sapiens
cccgtagcatctgatccagt

SEQ ID NO: 55 - DNA, 20 bp, Homo sapiens
agaaagcttcccctccactg

SEQ ID NO: 56 - DNA, 20 bp, Homo sapiens
cattccagcctgagctacaa

SEQ ID NO: 57 - DNA, 20 bp, Homo sapiens
tgggctccaattatccttcc

SEQ ID NO: 58 - DNA, 20 bp, Homo sapiens
tgcagtttgcactctccttg

SEQ ID NO: 59 - DNA, 21 bp, Homo sapiens
ttatctgttccccatgctttt

SEQ ID NO: 60 - DNA, 25 bp, Homo sapiens
tgttacatcttgatctatgacgttt

SEQ ID NO: 61 - DNA, 20 bp, Homo sapiens
tgtatcctgcatcccttgtt

SEQ ID NO: 62 - DNA, 27 bp, Homo sapiens
ggaataacccaaaagtaattgtagtga

SEQ ID NO: 63 - DNA, 20 bp, Homo sapiens
tcgtgccaagatgaaaatga

SEQ ID NO: 64 - DNA, 21 bp, Homo sapiens
aaacctccctgatcatctgaa

SEQ ID NO: 65 - DNA, 20 bp, Homo sapiens
acagaggagcaaaggaatca

SEQ ID NO: 66 - DNA, 20 bp, Homo sapiens
ttggcacgaatcactctctg

SEQ ID NO: 67 - DNA, 20 bp, Homo sapiens
ccccatttggatgatggtaa

SEQ ID NO: 68 - DNA, 25 bp, Homo sapiens
tgagaacatctaacgtctttttcaa

SEQ ID NO: 69 - DNA, 20 bp, Homo sapiens
ggcacagataactgggaagc

SEQ ID NO: 70 - DNA, 21 bp, Homo sapiens
cccccaaaagtactgcataaa

SEQ ID NO: 71 - DNA, 20 bp, Homo sapiens
atgttggcatttggtgaggt

SEQ ID NO: 72 - DNA, 20 bp, Homo sapiens
cacctgtccctttggaggta

SEQ ID NO: 73 - DNA, 26 bp, Homo sapiens
ttttaaacgtgaaaagtacaagttgc

SEQ ID NO: 74 - DNA, 21 bp, Homo sapiens
acaaagagcacctttccagtg

SEQ ID NO: 75 - DNA, 20 bp, Homo sapiens
tgcttggtgaaggaatagcc

SEQ ID NO: 76 - DNA, 20 bp, Homo sapiens
gagcctgggttctcaggaat

SEQ ID NO: 77 - DNA, 20 bp, Homo sapiens
ggcaagaacagtttggagga

SEQ ID NO: 78 - DNA, 20 bp, Homo sapiens
gactgctgtttgctggttga

SEQ ID NO: 79 - DNA, 24 bp, Homo sapiens
aaatggctataaagtgctttgaac

SEQ ID NO: 80 - DNA, 20 bp, Homo sapiens
cggtctcaacaaccagaaca

SEQ ID NO: 81 - DNA, 24 bp, Homo sapiens
cagaaacacacagaagtcattcaa

SEQ ID NO: 82 - DNA, 21 bp, Homo sapiens
cagacccaattaatggcaaaa

SEQ ID NO: 83 - DNA, 23 bp, Homo sapiens
tctgtcttctttgacccatgaat

SEQ ID NO: 84 - DNA, 20 bp, Homo sapiens
caacacagcgagacctcatc

SEQ ID NO: 85 - DNA, 151 bp, Homo sapiens
acaaagagcacctttccagtggacaactaactaaagtggtgtgattttggtataagtttgtgtgtgtgtgtgtgtgtgtgttgtgtgtgtgtgtatgtgtatacatttagttttattgtaacaaagcaacttgtacttttcacgtttaaaa

SEQ ID NO: 86 - DNA, 194 bp, Homo sapiens
tgcttggtgaaggaatagccaccccagagaaggagtatggacttctatacacaatcattcattcattcattcattcattcattcattcattcattcactactcatgcatgatctttgtccttatcttcctccactgtcacatgaatacccacccactgcacctacctgcttcctattcctgagaacccaggctc

SEQ ID NO: 87 - DNA, 25 bp, Homo sapiens
ggcaatggaggagttccgggacata

SEQ ID NO: 88 - DNA, 91 bp, Homo sapiens
ggcctcgagcagaacttcccatttgagtgggaccaagaagagcatacaaagctgaaatgttctccagaagttgatttccaatggggataaa

SEQ ID NO: 89 - DNA, 56 bp, Homo sapiens
tgattacaggttttagagaagaggaacaatgcttcctctgagcctgaagaaaagaa

SEQ ID NO: 90 - DNA, 170 bp, Homo sapiens
agttctgaccatgtcctgtgtcactctcaagcagagattgaaaatgacattcgtcctttacttgttccaaggaagcaaacattttatagtttgaaactgtttctcttgcatttgctttgcaagaggtttgcagaagttaagcctcatggagtcttctctccttaacttaa

SEQ ID NO: 91 - DNA, 49 bp, Homo sapiens
tgtgaagaatttggaaattgcaaggagcatgggaaggagatgatttggg

SEQ ID NO: 92 - DNA, 149 bp, Homo sapiens
gaatgaagaggaaatcaagacatacttagataaaaacagattatcaccaggagatctgctgtaaaagaatggctaaaggaagttagctaagcagaaaggaagtaacataaaaaggaaccttggaacatcagggaggacaaaagaacatg

SEQ ID NO: 93 - DNA, 282 bp, Homo sapiens
tttctctttctccaatcactcactctggaggcagctagctgtcaactcacaaagacactcaagcagcctatggaagaaggccacatggtaaaatatggaggcctccagccaacagtcagcaaggaactgagacaagtcaacaaccatgtgagtgactcgagaagtgcttctctagctccagttgagacttgcagtagcagcagcctcagctggcggcttgactgcaatctcttgagagaccctaagctctcctgaattcttgatccttagaaactgtgtgag

SEQ ID NO: 94 - DNA, 123 bp, Homo sapiens
ggtctagctgtgtcccagagagcaacttcccttttcaaggcagcccactctgtgtgatgctttttcctaggtatgggcaacccatccctcctagggtgaaaacttcgctgttgctagttccag

SEQ ID NO: 95 - DNA, 136 bp, Homo sapiens
aatgatgccgtattattctcctgacctaacttcaaagaaataaagagtttgcaagaagaactgcagttcttcaaagtacgcaatatggatttccaagatgaatgtagtttctctctctgaggaattctgaacagtg

SEQ ID NO: 96 - DNA, 73 bp, Homo sapiens
gacttgagcatctgaagattttggtttctgcagagggtgggaaaggttgaaccaatcccccatggataccaag

SEQ ID NO: 97 - DNA, 86 bp, Homo sapiens
ggctttccagatccctgaagataaaatacaaactctccaacaagaccttttggccatcaggaacgcagcacctggctctctcacta

SEQ ID NO: 98 - DNA, 58 bp, Homo sapiens
aaagtcgcagagatagcggagaacaagaaccagatctcacagtcatggtgccaaaaga

SEQ ID NO: 99 - DNA, 128 bp, Homo sapiens
ctgttaccctagcatgactgcttcagcgaagagataagagcttctttgactttttccactggaatttttcatgccagaagaaattgaacatgtgagcctggtgtctggaagagtagcctggatttatg

SEQ ID NO: 100 - DNA, 135 bp, Homo sapiens
aattcagctgttaccctagcatgactgcttcagcgaagagataagagcttctttgactttttccactggaatttttcatgccagaagaaattgaacatgtgagcctggtgtctggaagagtagcctggatttatg

SEQ ID NO: 101 - DNA, 72 bp, Homo sapiens
ttccttgatagttccaatatctgtaatcttgttggtctacctgtgcagtttattccactgattgtctctcag

SEQ ID NO: 102 - DNA, 76 bp, Homo sapiens
gcgaaaatactgaggctcaacagacataaaatggcttgagttaccaggctacagtagaactaggatttcagtccag

1. A method of diagnosing susceptibility to a stroke in an individual, comprising screening for an at-risk haplotype in the phosphodiesterase 4D gene that is more frequently present in an individual susceptible to stroke compared to a healthy individual, wherein the at-risk haplotype increases risk of stroke significantly.

2. The method of claim 1 wherein the significant increase is at least about 20%.

3. The method of claim 1 wherein the significant increase is identified as an odds ratio of at least about 1.2.

4. A method of diagnosing susceptibility to stroke in an individual, comprising screening for an at-risk haplotype in the phosphodiesterase 4D gene that is more frequently present in an individual susceptible to stroke (affected), compared to the frequency of its presence in a healthy individual (control), wherein the presence of the at-risk haplotype is indicative of a susceptibility to stroke.

5. The method of claim 4 wherein the at risk haplotype 1 is characterized by the presence of G at nucleic acid position 142780, relative to SEQ ID NO: 1 and allele 0 of microsatellite marker AC0088181-1.

6. The method of claim 4 wherein the at risk haplotype 2 is characterized by the presence of G T A A C C A C G A A C T T A T T G A A T T T G A A at nucleic acid postions: 142780, 135112, 132562, 131865, 129361, 129360, 125304, 123426, 123312, 120628, 118914, 111781, 111252, 109301, 107849, 105225, 104552, 102977, 100795, 99035, 88614, 88456, 83119, 82244, 80127, 78552, relative to SEQ ID NO: 1 and allele 0 of microsatellite marker AC0088181-1.

7. The method of claim 4 wherein the at risk haplotype 3 is characterized by the presence of A A C A A at nucleic acid positions 138806, 131865, 129361, 120628, 91470, relative to SEQ ID NO: 1.

8. The method of claim 4 wherein screening for the presence of an at-risk haplotype within or near PDE4D that significantly correlates with haplotype 1 or stroke susceptibility.

9. The method of claim 4 wherein screening for the presence of an at-risk haplotype within or near PDE4D that significantly correlates with haplotype 2 or stroke susceptibility.

10. The method of claim 4 wherein screening for the presence of an at-risk haplotype within or near PDE4D that significantly correlates with haplotype 3 or stroke susceptibility.

11. The method of claim 4 wherein screening for the presence of an at-risk haplotype in the phosphodiesterase 4D gene comprises enzymatic amplification of nucleic acid from said individual.

12. The method of claim 11 wherein the nucleic acid is DNA.

13. The method of claim 12 wherein the DNA is mammalian.

14. The method of claim 13 wherein the DNA is human.

15. The method of claim 4 wherein screening for the presence of an at-risk haplotype in the phosphodiesterase 4D gene comprises:
(a) obtaining material containing nucleic acid from the individual;
(b) amplifying said nucleic acid; and
(c) determining the presence or absence of an at-risk haplotype in said amplified nucleic acid.

16. The method of claim 15 wherein determining the presence of an at-risk haplotype is performed by electrophoretic analysis.

17. The method of claim 15 wherein determining the presence of an at-risk haplotype is performed by restriction length polymorphism analysis.

18. The method of claim 15 wherein determining the presence of an at-risk haplotype is performed by sequence analysis.

19. The method of claim 15 wherein determining the presence of an at-risk haplotype is performed by hybridization analysis.

20. A kit for diagnosing susceptibility to stroke in an individual comprising: primers for nucleic acid amplification of a region of the phosphodiesterase 4D gene comprising an at-risk haplotype.

21. The kit of claim 20 wherein the primers comprise a segment of nucleic acids of length suitable for nucleic acid amplification a single nucleotide polymorphism at nucleic acid position 142780 respectively, relative to SEQ ID NO: 1 and allele 0 of microsatellite marker AC0088181-1.

22. The kit of claim 20 wherein the primers comprise a segment of nucleic acids of length suitable for nucleic acid amplification, selected from the group consisting of: single nucleotide polymorphism or microsatellite marker at nucleic acid position 142780, 135112, 132562, 131865, 129361, 129360, 125304, 123426, 123312, 120628, 118914, 111781, 111252, 109301, 107849, 105225, 104552, 102977, 100795, 99035, 88614, 88456, 83119, 82244, 80127, 78552, relative to SEQ ID NO: 1, allele 0 of microsatellite marker AC0088181-1.
and combinations thereof.

23. The kit of claim 20 wherein the primers comprise a segment of nucleic acids of length suitable for nucleic acid amplification, selected from the group consisting of: single nucleotide polymorphism at nucleic acid position at nucleic acid position 138806, 131865, 129361, 120628, 91470, relative to SEQ ID NO: 1 and combinations thereof.

24. A method for assessing susceptibility to stroke in an individual, comprising determining PDE4D isoform expression levels in the individual compared to control, wherein a difference in isoform expression is indicative of susceptibility to stroke.

25. The method of claim 24 wherein isoform PDE4D7 and/or PDE4D9 expression is determined.

26. A method of diagnosing a susceptibility to stroke, comprising detecting an alteration in the expression or composition of a polypeptide encoded by phosphodiesterase 4D gene in a test sample, in comparison with the expression or composition of a polypeptide encoded by phosphodiesterase 4D gene in a control sample, wherein the presence of an alteration in expression or composition of the polypeptide in the test sample is indicative of a susceptibility to stroke.

27. The method of claim 26, wherein the alteration in the expression or composition of a polypeptide encoded by phosphodiesterase 4D gene comprises expression of a splicing variant polypeptide in a test sample that differs from a splicing variant polypeptide expressed in a control sample.

28. A method for preventing the occurrence of stroke in an individual in need thereof, comprising regulating a PDE4D isoform level compared to control, whereby the regulated isoform level mimics the level in a healthy individual.

29. The method of claim 28 wherein isoform level is regulated by regulating expression of the isoform using a phosphodiesterase 4D gene binding agent, a phosphodiesterase 4D gene receptor, a peptidomimetic, a fusion protein, a prodrug, an antibody or a ribozyme.

30. The method of claim 28 wherein the isoform level is controlled by genetically altering the isoform's expression level.

31. The method of claim 28 wherein the isoform level is regulated by altering the ratio of isoforms.

32. The method of claim 28 wherein isoform PDE4D7 and/or PDE4D9 is regulated.

33. A method for monitoring the effectiveness of treatment on the regulation of expression of one or more PDE4D isoforms at the RNA or protein level, or its enzymatic activity by measuring PDE4D message or protein or enzymatic activity in a sample of peripheral blood or cells derived thereof.

34. A method for predicting the effectiveness of a given therapeutic for stroke prevention or treatment in a given individual comprising screening for the presence or absence of the stroke at-risk haplotype in the phosphodiesterase 4D gene.

35. A method for predicting the effectiveness of a given therapeutic for stroke prevention or treatment in a given individual comprising screening for the expression of one or more PDE4D isoforms at the RNA or protein level, or its enzymatic activity by measuring PDE4D message or protein or enzymatic activity in a sample of peripheral blood or cells derived thereof.

36. A method of diagnosing a reduced or protective susceptibility to a stroke in an individual, comprising screening for a protective haplotype in the phosphodiesterase, 4D gene that is more frequently present in an individual compared to an individual susceptible to stroke, wherein the protective haplotype decreases the risk of stroke significantly

37. A method of claim 36 wherein the protective haplotype is characterized by the A allele at position 142780, relative to SEQ ID NO: 1 and allele-8 for microsatellitemarker AC0088181-1.
